(19) United States
(12) Patent Application Publication
(10) Pub. No.: US 2026/0168000 A1
(43) Pub. Date: Jun. 18, 2026

(54) GENETICALLY MODIFIED BENZYLISOQUINOLINE ALKALOID-PRODUCING HOST CELLS WITH MODIFIED EFFLUX TRANSPORTER GENE EXPRESSION

(71) Applicant: RIVER STONE BIOTECH APS, Copenhagen (DK)

(72) Inventors: Esben Halkjaer HANSEN, Copenhagen (DK); Laura Tatjer RECORDA, Copenhagen (DK); Pernille Lund LYNEBORG, Copenhagen (DK); Giedre BACINSKAJA, Copenhagen (DK); Jens HOUGHTON-LARSEN, Copenhagen (DK)

(21) Appl. No.: 19/127,269

(22) PCT Filed: Nov. 7, 2023
(86) PCT No.: PCT/EP2023/081034

§ 371 Date: May 5, 2025

(30) Foreign Application Priority Data
Nov. 8, 2022 (EP) 22206111.1

(51) Int. Cl. C12P 17/18; C07K 14/395; C12N 1/18; C12N 9/02; C12N 9/42; C12N 15/52; C12P 19/60; C12R 1/865

(52) U.S. Cl. CPC C12P 17/188; C07K 14/395; C12N 1/18; C12N 9/0042; C12N 9/0071; C12N 9/2445; C12N 15/52; C12P 19/60; C12R 2001/865; C12Y 106/02004; C12Y 114/14001; C12Y 302/01021

(57) ABSTRACT

The invention relates to genetically modified hosts cell comprising a recombinant pathway having enhanced production of one or more benzylisoquinoline alkaloids or glycosylated benzylisoquinoline alkaloid, wherein the host cell has been further modified so as to have an increased ability to export end products of the recombinant pathway (such as nororipavine or gly-nororipavine).

### FIELD OF THE INVENTION

[0001] The present disclosure relates to methods of producing benzylisoquinoline alkaloids (one or more BIA, BIA-glycoside, oripavine, glucosylated oripavine, gly-oripavine, thebaine, northebaine, nororipavine, gly-nororipavine, glucosylated nororipavine, nor-opioids or glycosylated noropioids), by the use of host cells genetically modified to (i) express one or more genes in an operative metabolic pathway producing the benzylisoquinoline alkaloids and (ii) modified expression of BIA-relevant efflux transporters.

### BACKGROUND OF THE INVENTION

[0002] Effective production of pharmaceutical opioids by biotransformation, such as wholly or partly by fermentation of genetically engineered strains and/or by bioconversion, requires complex engineering and optimization of metabolic pathways producing the opioids or their precursors and optionally further chemical modifications. Some pharmaceutical opioids with desirable pharmacological properties, such as buprenorphine, naltrexone, naloxone and nalbuphine require demethylation of benzylisoquinoline alkaloids (BIAs) such as thebaine and/or oripavine and an N-alkylation of the demethylated benzylisoquinoline alkaloid, such as for the production of buprenorphine from nororipavine. Such production of BIAs using genetically modified host cell cultures expressing one or more genes in an operative metabolic pathway producing the benzylisoquinoline alkaloids has previously been disclosed by this research group in WO2021/069714, the contents of which are incorporated herein in their entirety.

[0003] However, for even greater improvements in the efficiently of producing pharmaceutical opioids there is a need for improving and optimising both pathways in genetically modified microbial strains producing BIA products (such as noropioids and glycosylated-noropioids) as well as enhanced efflux of the desirable BIA products out of the modified host cells, so as to enhance titers from cultures of recombinant microbial host cells, aid purification of the BIA products therefrom, and/or permit production of the BIA products from batch, fed-batch, semi-continuous, or continuous fermentation of the recombinant microbial host cells. Improved efflux of BIAs and/or glycosylated BIAs (such as oripavine, gly-oripavine, nororipavine and gly-nororipavine) have also surprisingly been observed to increase culture biomass and therefore increase production efficiency further from recombinant microbial host cells.

[0004] Earlier opiod strain development work was focused on or suggested the deletion of multidrug or ABC efflux transporters to prevent efflux of important intermediates in the pathway, or induction of these efflux transporters' expression during the stationary phase once production of the opioid is finished (US 2018/334695), as well as identifying these transporters from BIA-producing plants such as poppies. WO 2019/243624 suggests the downregulation or deletion of transporters that excrete intermediates in the BIA pathways, notably molecules that are prior to formation of a BIA molecule. Similarly Narcross et al. 2016 suggested that knocking out transporters could be a means to controlling the ratio of BIA end products. In the literature that does suggest overexpression of transporters for production of BIAs, as opposed to downregulation/knock out, the types of transporters cited are generally of the purine permease family of transporters (PUP). These are used in processes with demethylases for uptake of substrates such as thebaine, oripavine, or northebaine to allow for more efficient conversion to the demethylated endproducts (WO 2021/069714 A1, WO2020/078837, WO 2018/229306 for example). Because permeases can be involved in efflux and uptake, efflux can not be ruled out; however, PUPs were selected in this body of work that were specific to the uptake of substrate molecules and not the demethylated endproducts.

### SUMMARY OF THE INVENTION

[0005] Beyond the background art of several pathway enzymes capable of contributing to more efficient production of high specificity and purity, BIAs and/or BIA derivatives, in recombinant host cells, the work presented herein discloses benefits of modifying within such host cells the efflux (outward transportation) of BIAs and/or BIA derivatives (one or more BIA, BIA-glycoside, oripavine, glucosylated oripavine, gly-oripavine, thebaine, northebaine, nororipavine, gly-nororipavine, glucosylated nororipavine, nor-opioids or glycosylated noropioids by selecting a specific family and subfamily of efflux transporters with specificity for the products of interest compared to intermediates and substrates. Modification of the recombinant host cell's transport system may be done by upregulation of endogenous host cell transporters shown herein to efflux desirable BIAs and/or BIA derivatives. Alternatively, or additionally, modification of the recombinant host cell's transport system may be done by functional addition (and optionally high expression) of heterologous transporters shown herein to efflux desirable BIAs and/or BIA derivatives. In some aspects, the BIA-transporters are able to efflux from the host cell glycosylated derivatives of the desirable BIAs (such as but not limited to glycosylated nororipavine). Glycosylation of nororipavine not only produces a hitherto unknown opioid glycoside, which possesses interesting properties and improves production of nor compounds by the cell, but in vivo expression of efflux transporters also offers a range of hitherto unknown advantages in processes of producing glycosylated nororipavine in genetically modified cell factories, such as yeast, including but not limited to: excretion and separation of nororipavine glycosides from the cells which prevents (i) intracellular nororipavine degradation; (ii) acidification of the yeast cytosol and the stress associated with repeated cycles of excretion and proton driven uptake of nororipavine; (iii) inhibition of oripavine uptake by unwanted competitive uptake of extracellular nororipavine; (iv) product inhibition of the oripavine demethylase enzyme by presence of high concentrations of nororipavine; and (v) increase in propagation and biomass production of genetically modified cell factories glycosylating nororipavine.

[0006] A membrane transport protein (or simply transporter) is a membrane protein involved in the movement of ions, small molecules, or macromolecules, such as peptides, across a biological membrane. As discussed in the article of Brohée et al. (“YTPdb: A wiki database of yeast membrane transporters”; Biochimica et Biophysica Acta 1798 (2010) 1908-1912)—among the 5690 protein-encoding genes of the yeast Saccharomyces Cerevisiae—almost 300 code for established or predicted membrane transport (transporter) proteins. The Saccharomyces Genome Database (SGD) (https://www.yeastgenome.org) provides a description of all protein-encoding genes of the yeast Saccharomyces Cerevisiae—for instance is said in relation to the membrane transporter with standard name “QDR2” that is a transporter that “has broad substrate specificity and can transport many mono- and divalent cations” (https://www.yeastgenome.org/locus/S000001383).

[0007] As disclosed herein, the present inventors tested overexpression of a number of endogenous and heterologous membrane transporter related genes which could potentially have an influence on the yield of in vivo production of nororipavine and glycosylated noripavine as well as thebaine, oripavine and glycosylated oripavine, which are precursors for synthesis routes to known active pharmaceutical ingredients (“APIs”) such as opioid compounds.

[0008] Furthermore, as disclosed herein, the present inventors also tested overexpression of endogenous yeast transporters (e.g. YOR1 and PDR5) and expression of a number of heterologous (non-native) membrane transporter genes which could potentially have an influence on the yield of in vivo bioconversion of oripavine or thebaine to relevant downstream opioid biosynthesis compounds. As discussed in the working examples herein, the inventors were also able to identify a number of heterologous membrane transporter genes that were observed to have a positive effect on the yield of in vivo bioconversion and/or production of BIAs and BIA derivatives, such as oripavine conversion to nororipavine and glucosylated nororipavine. Without being limited to theory, it is contemplated that the improved positive yield effect demonstrated herein related to the expression of certain heterologous membrane transporter genes could be related to a purported ability of those heterologous transporters to efflux BIAs and/or BIA derivatives, which not only permits easier purification and downstream processing, but may also facilitate more efficient enzyme conversions by removing the products formed and thereby create better “sink” conditions driving the chemical reactions leading to the desired BIAs and/or BIA derivatives.

[0009] Accordingly, the present invention provides in a first aspect a genetically modified (recombinant) microbial host cell capable of producing one or more benzylisoquinoline alkaloids (BIAs) (such as BIA-glycoside, oripavine or oripavine glycoside or glucosylated oripavine, thebaine, northebaine, nororipavine or gly-nororipavine or glucosylated nororipavine) wherein the host cell comprises a recombinant polynucleotide comprising a promoter operably linked to an ABC transporter capable of effluxing one or more BIAs or glycosylated BIAs. In some aspects, the recombinant microbial host cell of the current invention comprises an ABC transporter which is an ABCC/multi-drug resistance associated protein (MRP) ABC transporters or an ABCG/pleiotropic drug resistance (PDR) ABC transporters. In some aspects, BIA-relevant (such as BIA-glycoside, oripavine or gly-oripavine or glucosylated oripavine, thebaine, northebaine, nororipavine or gly-nororipavine or glucosylated nororipavine) efflux transporters are ABC transporters. In some aspects, the BIA-relevant (BIA-glycoside, oripavine, thebaine, northebaine, nororipavine or gly-nororipavine or glucosylated nororipavine) efflux transporters are members of the ABCG/pleiotropic drug resistance (PDR) subfamily of ABC transporters, or members of the ABCC/multi-drug resistance associated protein (MRP) subfamily of ABC transporters.

[0010] In some aspects, the current invention provides genetically modified (recombinant) microbial host cell capable of producing one or more benzylisoquinoline alkaloids and comprising one or more ABC transporters (such as ABCC or ABCG transporters) capable of effluxing the BIA, BIA-glycoside, oripavine, thebaine, northebaine, nororipavine, gly-nororipavine, glucosylated nororipavine nor-opioids or glycosylated noropioids, may comprise the following enzymes involved in the production of the BIA:
[0011] (1) one or more heterologous CYP demethylases capable of converting thebaine into northebaine, thebaine into oripavine, northebaine into nororipavine and/or oripavine into nororipavine, and one or more demethylase cytochrome P450 reductase (demethylase-CPR), and/or
[0012] (2) heterologous sequences encoding:
   [0013] (a) a tyrosine hydroxylase (TH) converting L-tyrosine into L-dopa, and
   [0014] (b) optionally, a TH-CPR capable of reducing the TH of (a); and
   [0015] (c) a L-dopa decarboxylase (DODC) converting L-dopa into dopamine, or a tyrosine decarboxylase (TYDC) converting L-dopa into dopamine; and
   [0016] (d) a monoamine oxidase converting dopamine into 3,4-DHPAA, or a N-methyl-coclaurine hydroxylase (NMCH) converting (S)-Coclaurine into (S)-3′-hydroxycoclaurine and/or (S)—N-Methylcoclaurine into (S)-3′-Hydroxy-N-Methylcoclaurine; and
   [0017] (e) a norcoclaurine synthase (NCS) converting Dopamine and 4-HPAA into (S)-norcoclaurine and/or 3,4-DHPAA and dopamine to norlaudanosoline; and
   [0018] (f) a 6-O-methyltransferase (6-OMT) converting (S)-norcoclaurine into (S)-Coclaurine and/or norlaudanosoline into (S)-3′-Hydroxy-coclaurine; and
   [0019] (g) a coclaurine-N-methyltransferase (CNMT) converting (S)-Coclaurine into (S)—N-Methylcoclaurine and/or (S)-3′-hydroxycoclaurine into (S)-3′-hydroxy-N-methyl-coclaurine; and
   [0020] (h) a 3′-hydroxy-N-methyl-(S)-coclaurine 4′-O-methyltransferase (4′-OMT) converting (S)-3′-Hydroxy-N-Methylcoclaurine into (S)-reticuline; and
   [0021] (i) a 1,2-dehydroreticuline synthase-1,2-dehydroreticuline reductase (DRS-DRR) converting (S)-reticuline into (R)-reticuline comprised of one or more proteins; and
   [0022] (j) a salutaridine synthase (SAS) converting (R)-reticuline into Salutaridine; and
   [0023] (k) a salutaridine reductase (SAR) converting Salutaridine to Salutaridinol; and
   [0024] (l) a salutaridinol 7-O-acetyltransferase (SAT) converting Salutaridinol into 7-O-acetylsalutaridinol; and
   [0025] (m) a thebaine synthase (THS) converting 7-O-acetylsalutaridinol or 7-O-acetylsalutaridinol acetate into thebaine;
[0026] (3) and optionally, one or more glycosyl transferases capable of transferring a glycosyl moiety to the BIA (such as oripavine or nororipavine).

[0027] In some aspects, the host cell produces BIAs from a precursor molecule such as thebaine or oripavine, and requires one or more heterologous demethylase enzymes and optionally a demethylase-CPR and/or one or more glycosyl transferases capable of transferring a glycosyl moiety to oripavine or nororipavine. In some aspects, the host produces BIAs de novo via a pathway from tyrosine to thebaine (and thence to downstream BIAs) and comprises the enzyme activities: TYRH, DODC, NCS, 6OMT, CNMT, NMCH, 4OMT, DRS-DRR, SAS, SAR, SAT, THS and if the BIA is downstream of thebaine, optionally one or more demethylases converting thebaine into oripavine, thebaine into northebaine, oripavine into nororipavine and/or northebaine into nororipavine, and optionally a demethylase-CPR capable of reducing the demethylase, optionally, one or more glycosyl transferases capable of transferring a glycosyl moiety to oripavine or nororipavine. In other aspects, the pathway from tyrosine to thebaine (and thence to downstream BIAs) comprises the enzyme activities: TYRH, DODC, MAO, NCS, 6OMT, CNMT, 4 OMT, DRS-DRR, sal synthase, sal reductase, sat1, thebaine synthase.

[0028] In another aspect, the present invention provides:
[0029] 1) a pathway having enhanced production of one or more benzylisoquinoline alkaloids (BIAs) or benzylisoquinoline alkaloids derivatives, wherein the cell comprises one or more features selected from:
   [0030] a) expression of one or more heterologous genes encoding a demethylase capable of converting thebaine into northebaine, thebaine into oripavine, northebaine into nororipavine and/or oripavine into nororipavine;
   [0031] b) expression of one or more heterologous genes encoding a tyrosine hydroxylase (TH) converting L-tyrosine into L-dopa, such as one or more TH having at least 70% identity, such as at least 75% identity, such as at least 80%, such as at least 85%, such as at least 90%, such as at least 95%, such as at least 99%, such as 100% identity to the TH comprised in SEQ ID No. 7, 9, 11, 13, 15, 17, 19, 21, 23, 25, 27, 29, 31, 33, 35, 37, 39, 41, 43, 45, 47, 49, 51, 53, 55, 57, 59, 61, 63 or 65;
   [0032] c) reduction or elimination of activity of one or more dehydrogenases native to the host cell, such as one or more dehydrogenases having at least 70% identity, such as at least 75% identity, such as at least 80%, such as at least 85%, such as at least 90%, such as at least 95%, such as at least 99%, such as 100% identity to the dehydrogenase comprised in SEQ ID NO: 663, 665, 667, 669, 671, 673, 675, 677, 679, 681, 683, 685, 687, 689, 691, 693, 695, 697, 699, 701, 703 or 705;
   [0033] d) reduction or elimination of activity of one or more reductases native to the host cell, such as one or more reductases having at least 70% identity, such as at least 75% identity, such as at least 80%, such as at least 85%, such as at least 90%, such as at least 95%, such as at least 99%, such as 100% identity to the reductase comprised in SEQ ID NO: 707, 709, 711, 713, 715, 717, 719, 721, 723, 725, 727, 729 or 731;
   [0034] e) expression of one or more heterologous genes encoding a norcoclaurine synthase (NCS) converting Dopamine and 4-HPAA into (S)-norcoclaurine, such as one or more NCS having at least 70% identity, such as at least 75% identity, such as at least 80%, such as at least 85%, such as at least 90%, such as at least 95%, such as at least 99%, such as 100% identity to the NCS comprised in SEQ ID NO: 73 OR 76;
   [0035] f) expression of one or more heterologous genes encoding:
   [0036] i) a fused 1,2-dehydroreticuline synthase-1,2-dehydroreticuline reductase (DRS-DRR) converting (S)-Reticuline into (R)-reticuline, wherein
      [0037] ia) the DRS-DDR has at least 70% identity, such as at least 75% identity, such as at least 80%, such as at least 85%, such as at least 90%, such as at least 95%, such as at least 99%, such as 100% identity to the DRS-DRR comprised in SEQ ID NO: 92, 94, 96; or
      [0038] ib) the DRS moiety has at least 70% identity, such as at least 75% identity, such as at least 80%, such as at least 85%, such as at least 90%, such as at least 95%, such as at least 99%, such as 100% identity to the DRS comprised in SEQ ID NO: 98, 100, 102, 104 or 106; and the DRR moiety has at least 70% identity, such as at least 75% identity, such as at least 80%, such as at least 85%, such as at least 90%, such as at least 95%, such as at least 99%, such as 100% identity to the DRR comprised in SEQ ID NO: 108 or 110; or
   [0039] ii) a DRS having at least at least 70% identity, such as 75% identity, such as at least 80%, such as at least 85%, such as at least 90%, such as at least 95%, such as at least 99%, such as 100% identity to the DRS comprised in SEQ ID NO: 98, 100, 102, 104 or 106; and a DRR having at least 70% identity to the DRR comprised in SEQ ID NO: 108 or 110;
   [0040] iii) a fused 1,2-dehydroreticuline synthase-1,2-dehydroreticuline reductase (DRS-DRR) converting (S)-Reticuline into (R)-reticuline, wherein the fused DRS-DRR has at least 70% identity, such as at least 75% identity, such as at least 80%, such as at least 85%, such as at least 90%, such as at least 95%, such as at least 99%, such as 100% identity to the DRS-DRR comprised in SEQ ID NO: 92, 94, 96; and/or
   [0041] iv) a 1,2-dehydroreticuline synthase (DRS) and a 1,2-dehydroreticuline reductases (DDR), wherein the DRS has at least 75% identity, such as at least 80%, such as at least 85%, such as at least 90%, such as at least 95%, such as at least 99%, such as 100% identity to the DRS comprised in SEQ ID NO: 98, 100, 102, 104 or 106; and the DDR has at least 70%, such as at least 75% identity, such as at least 80%, such as at least 85%, such as at least 90%, such as at least 95%, such as at least 99%, such as 100% identity to the DRR comprised in SEQ ID NO: 108 or 110;
   [0042] g) expression of one or more heterologous genes encoding a thebaine synthase (THS) converting 7-O-acetylsalutaridinol into thebaine, such as one or more THS having at least 70%, such as at least 75% identity, such as at least 80%, such as at least 85%, such as at least 90%, such as at least 95%, such as at least 99%, such as 100% identity to the THS comprised in SEQ ID NO: 126, 127, 128, 129, 131, 133, 134, 136 or 138; and
   [0043] h) expression of one or more heterologous genes encoding a transporter protein capable of increasing uptake in the host cell of a reticuline derivative, such as one or more transporter proteins having at least 70%, such as at least 75% identity, such as at least 80%, such as at least 85%, such as at least 90%, such as at least 95%, such as at least 99%, such as 100% identity to the transporter protein comprised in SEQ ID NO: 307, 309, 311, 313, 315, 317, 319, 321, 323, 325, 327, 329, 331, 333, 335, 337, 339, 341, 343, 345, 347, 349, 351, 353, 355, 357, 359, 361, 363, 365, 367, 369, 371, 373, 375, 377, 379, 381, 383, 385, 387, 389, 391, 393, 395, 397, 399, 401, 403, 405, 407, 409, 411, 413, 415, 417, 419, 421, 423, 425, 427, 429, 431, 433, 435, 437, 439, 441, 443, 445, 447, 449, 451, 453, 455, 457, 459, 461, 463, 465, 467, 469, 471, 473, 475, 477, 479, 481, 483, 485, 487, 489, 491, 493, 495, 497, 499, 501, 503, 505, 507, 509, 511, 513, 515, 517, 519, 521, 523, 525, 527, 529, 531, 533, 535, 537, 539, 541, 543, 545, 547, 549, 551, 553, 555, 557, 559, 561, 563, 565, 567, 569, 571, 573, 575, 577, 579, 581, 583, 585, 587, 589, 591, 593, 595, 597, 599, 601, 603, 605, 607, 609, 611, 613, 615, 617, 619, 621, 623, 625, 627, 629, 631, 633, 635, 637, 639, 641, 643, 645, 647, 649, 651, 653, 655, 657, 659, 661, 733, 735, 774, 776, 778, 780, 782, 784, 786, 788, 790, 792, 794, 795, 797, 799, 801, 803, 805, 807, 809, 811, 813, 815, 817, 819, 821, 823 or 825,
[0044] 2) modified expression of one or more BIA-relevant (such as nororipavine and/or gly-nororipavine) efflux transporters, wherein the cell comprises one or more features selected from:
   [0045] a) overexpression of one or more of the recombinant host cell's endogenous ABC transporters capable of effluxing desirable BIAs and/or BIA derivatives (one or more BIA, BIA-glycoside, oripavine, glucosylated oripavine, gly-oripavine, thebaine, northebaine, nororipavine, gly-nororipavine, glucosylated nororipavine, nor-opioids or glycosylated noropioids), including but not limited to one or more ABC transporter comprising Walker A sequences G (S/A/L/V/M/P) IG (T/S) GK and GRTGAGK and the linker sequences LSGGQ and NFSLGE, and having at least 45%, such as at least 50%, such as at least 55%, having at least 60%, such as at least 75%, such as at least 80%, such as at least 85%, such as at least 90%, such as at least 95%, such as at least 99%, or 100% identity to SEQ ID No. 872, and/or
   [0046] b) the functional addition into the recombinant host cell of one or more exogenous ABC transporter capable of effluxing desirable BIAs and/or BIA derivatives (one or more BIA, BIA-glycoside, oripavine, glucosylated oripavine, gly-oripavine, thebaine, northebaine, nororipavine, gly-nororipavine, glucosylated nororipavine, nor-opioids or glycosylated noropioids), such as one or more exogenous ABC transporter:
      [0047] i. that is an ABCC/multi-drug resistance associated protein (MRP) ABC transporters, such as an ABC transporter comprising Walker A sequences G(X)(I/V)G(S/T)GK where X is a residue selected from P, L, S, A, V or M and GRTGAGK, two linker sequences comprising LSGGQ and NFSLGE, and Walker B sequences (I/V/T)(I/Y/V)L(M/F/L)D and I(I/L)(I/V)(L/M)D, such as an ABC transporter having at least 45%, such as at least 50%, such as at least 55%, having at least 60%, such as at least 75%, such as at least 80%, such as at least 85%, such as at least 90%, such as at least 95%, such as at least 99%, or 100% identity to SEQ ID No. 910, 912, 914, 918, 920, 922, 924, 926, 928, 930, 932, 934, 936, 938, 940, 942, 956, 960, 962, 964, 966, 970, 1032, 1034, or 1040, or encoded by a nucleic acid sequence having at least 45%, such as at least 60%, such as at least 70%, such as at least 80%, such as at least 85%, such as at least 90%, such as at least 95%, such as at least 99%, such as 100% identity to SEQ ID No. 871, 909, 911, 913, 917, 919, 921, 923, 925, 927, 929, 931, 933, 935, 937, 939, 941, 955, 959, 961, 963, 965, 969, 1031, 1033, or 1039, or genomic DNA thereof, or,
      [0048] ii. that is an ABCG/pleiotropic drug resistance (PDR) ABC transporters, such as an ABC transporter comprising Walker A sequences GRPGSGC(S/T) and G(A/S)SGAGKT, S sequences VSGGERKRVSIA and LNVEQRKRLTIG, and Walker B sequences (F/L)QCWD and LL(V/L)F(L/F)D, such as an ABC transporter having at least 45%, such as at least 50%, such as at least 55%, having at least 60%, such as at least 75%, such as at least 80%, such as at least 85%, such as at least 90%, such as at least 95%, such as at least 99%, or 100% identity to SEQ ID No. 916, 976, 980, 986, 988, 990, 994, 996, 1010, 1012, 1018, 1020, 1022, 1026, 1028, 1030 or 1038, or encoded by a nucleic acid sequence having at least 45%, such as at least 60%, such as at least 70%, such as at least 80%, such as at least 85%, such as at least 90%, such as at least 95%, such as at least 99%, such as 100% identity to SEQ ID No. 915, 975, 979, 985, 987, 989, 993, 995, 1009, 1011, 1017, 1019, 1021, 1025, 1027, 1029 or 1037, or genomic DNA thereof.

[0049] In a further aspect the invention provides a recombinant host cell comprising a recombinant polynucleotide sequence encoding a heterologous efflux transporter protein of the invention operably linked to one or more control sequences.

[0050] In a further aspect the invention provides a cell culture, comprising the recombinant host cell of the invention and a growth medium.

[0051] In a further aspect the invention provides a method for producing a BIA and/or BIA derivative (one or more BIA, BIA-glycoside, oripavine, glucosylated oripavine, gly-oripavine, thebaine, northebaine, nororipavine, gly-nororipavine, glucosylated nororipavine, nor-opioids or glycosylated noropioids), comprising:
[0052] a) culturing the cell culture of the invention at conditions allowing the recombinant host cell to produce the BIA and/or BIA derivative; and
[0053] b) optionally recovering and/or isolating the BIA and/or BIA derivative.

[0054] In many aspects, the ABC transporters of the current invention have been selected on the basis of increased specificity for the BIAs and/or BIA derivatives produced by the recombinant host cell (one or more BIA, BIA-glycoside, oripavine, glucosylated oripavine, gly-oripavine, thebaine, northebaine, nororipavine, gly-nororipavine, glucosylated nororipavine, nor-opioids or glycosylated noropioids) compared to one or more intermediate molecules in or substrates fed into the BIA-producing biosynthetic pathway engineered into the recombinant host cell.

[0055] In a further aspect the invention provides a fermentation composition comprising the cell culture of the invention and the BIA and/or BIA derivative (one or more BIA, BIA-glycoside, oripavine, glucosylated oripavine, gly-oripavine, thebaine, northebaine, nororipavine, gly-nororipavine, glucosylated nororipavine, nor-opioids or glycosylated noropioids) comprised therein.

[0056] In a further aspect the invention provides a composition comprising the fermentation composition of the invention and one or more carriers, agents, additives and/or excipients.

[0057] In a further aspect the invention provides a pharmaceutical composition comprising the fermentation composition of the invention and one or more pharmaceutical grade excipient, additives and/or adjuvants.

[0058] In a further aspect the invention provides a method for preparing the pharmaceutical composition of the invention comprising mixing the fermentation composition of the invention with one or more pharmaceutical grade excipient, additives and/or adjuvants.

[0059] In a further aspect the invention provides a method for preventing, treating and/or relieving a disease comprising administering a therapeutically effective amount of the pharmaceutical composition of the invention to a mammal.

### DESCRIPTION OF DRAWINGS AND FIGURES

[0060] FIG. 1 shows the pathway for making the benzylisoquinoline alkaloid precursor tyrosine via the Shikimate pathway and additional steps for producing(s)-norcoclaurine.

[0061] FIG. 2 depicts a range of benzylisoquinoline alkaloid compounds having pharmaceutical properties which are derivatives of (S)-norcoclaurine.

[0062] FIG. 3 shows a schematic representation of the biosynthetic pathway from glucose to thebaine in genetically modified S. cerevisiae strains. Enzymes from NCS to SAT/THS as well as Tyrosine hydroxylase (TH) and DOPA decarboxylase (DODC) are enzymes expressed from heterologous genes.

[0063] FIG. 4 shows Glucosylated nororipavine measured outside and inside the cells normalized to a negative control cell (strain with empty plasmid RPB15).

[0064] FIG. 5 shows improvement in fermentation titers of total nororipavine (both glycosylated and unglycosylated) when strains expressing heterologous efflux transporters are used.

[0065] FIG. 6. shows nororipavine export by various YOR1 homologs.

[0066] FIGS. 7a and 7b show microtiter-based screening of nororipavine and nororipavine-glu producing strains expressing PDR5 homologs.

[0067] FIG. 8a. shows 96-deepwell plate screening of oripavine producing strains demonstrating the impact of transporter expression on total bioconversion. Triplicate values of oripavine production by expression of different exporters were normalized to the average oripavine production number obtained by sOD1133 transformed with the empty plasmid, RPB15. The average and Standard deviations of the normalized triplicates are shown.

[0068] FIG. 8b. shows transporters exhibiting a reduction in thebaine to oripavine conversion.

### INCORPORATION BY REFERENCE

[0069] All publications, patents, and patent applications referred to herein (including, but not limited to PCT/EP2022/062130, WO2021/069714, WO2018/229306, WO2018/075670, WO2019/243624, WO2018/029282, WO2019/157383, Pyne et al, BioRxiv preprint 2019, WO2018/229305, WO2014/143744, WO2019/165551, US2015267233, WO2015/081437, WO2016/183023, WO2015/173590, WO2018/000089, WO2019/028390, WO2019/165551, WO2018/005553, WO2014/143744, WO2019/165551, WO2020/078837, US2019100781, WO2019/165551, Brohée et al. 2010, Dias et al. 2010, WO2018211331, WO 2021/144362, R J Carroll et al. 2009, Galanie S, et al. 2015, Fossati E et al. 2015, Tomas Hudlicky. 2015, Amitava Dasgupta, 2020) are incorporated by reference to the same extent as if each individual publication, patent, or patent application was specifically and individually indicated to be incorporated by reference. In the event of a conflict between a term herein and a term in an incorporated reference, the term herein prevails and controls.

### DETAILED DESCRIPTION OF THE INVENTION

### Definitions

[0070] Any EC numbers used herein refers to Enzyme Nomenclature 1992 from NC-IUBMB, Academic Press, San Diego, California, including 30 supplements 1-5 published in Eur. J. Biochem. 1994, 223, 1-5; Eur. J. Biochem. 1995, 232, 1-6; Eur. J. Biochem. 1996, 237, 1-5; Eur. J. Biochem. 1997, 250, 1-6; and Eur. J. Biochem. 1999, 264, 610-650; respectively. The nomenclature is regularly supplemented and updated; see e.g. http://enzyme.expasy.org/.

[0071] Drug transport proteins can be categorized into two major classes that include solute carriers (SLC) and ATP-Binding Cassette (ABC) transporters. From the human genome around 380 unique SLC sequences have been obtained which can be further divided into 48 sub families. The xenobiotics transport activities for around 19 of these gene families were described. These transporters include organic anion transporting polypeptide (OATP), oligopeptide transporter, organic anion/cation/zwitter ion transporter and organic cation transporter (OCT).

[0072] Within the 49 different ABC transporter genes so far identified, seven sub families have so far been categorised. In particular, transporters belonging to the ABCB, ABCC and ABCG sub families have specificities for various drugs. SLC and ABC transporters are involved in the transport of a wide range of substrates and have a wide distribution in the body. Based on the direction of translocation across the cell membrane, the transporter may be categorized as an influx transporter (for uptake into the cell) or an efflux transporter (for excretion out of the cell). ABC transporters are efflux transporters that utilize energy derived from ATP hydrolysis to mediate the active export of molecules from the intracellular to the extracellular mileu, often against a concentration gradient. In contrast, the cellular uptake (influx) of substrates is facilitated by the majority of the SLC family members. However, depending on the concentration gradients of substrate and coupled ion across the membrane, some of the SLC transporters exhibit efflux properties.

[0073] It should be noted that especially in recombinant host cells, the intracellular and extracellular concentrations of various pathway precursors, intermediates and final products may well not be similar to those of an unmodified host cell. Additionally, the concentration gradient of each of these precursors, intermediates and final products between the intracellular and extracellular environments will depend on the efficiency of the recombinant pathway producing the BIA or BIA-derivative, and so the beneficial effects disclosed for the first time herein of modifying selected transporter capabilities of host cells may not have been apparent in earlier investigations.

[0074] The term “PEP” as used herein refers to phosphoenol pyruvate.

[0075] The term “E4P” as used herein refers to erythrose-4-phosphate

[0076] The term “Aro4” as used herein refers to DAHP synthase catalyzing the reaction of PEP and E4P into DAHP.

[0077] The term “DAHP” as used herein refers to 3-deoxy-D-arabino-2-heptulosonic acid 7-phosphate.

[0078] The term “Aro1” as used herein refers to EPSP synthase catalyzing conversion of DAHP into EPSP.

[0079] The term “EPSP” as used herein refers to 5-enolpyruvylshikimate-3-phosphate. The term “Aro2” as used herein refers to chorismate synthase catalyzing conversion of EPSP into chorismate.

[0080] The term “Tyr1” as used herein refers to prephenate dehydrogenase catalyzing conversion of prephenate into 4-HPP

[0081] The term “4-HPP” as used herein refers to 4-hydroxyphenylpyruvate

[0082] The term “Aro8” and “Aro9” as used herein refers to aromatic aminotransferase reversibly catalyzing conversion of 4-HPP into L-tyrosine

[0083] The term “ARO10” or HPPDC as used herein refers to hydroxyphenylpyruvate decarboxylase catalyzing 4-HPP into 4-HPAA.

[0084] The term “4-HPAA” as used herein refers to 4-Hydroxyphenylacetaldehyde.

[0085] The term “TH” as used herein refers to a cytochrome P450 enzyme having tyrosine hydroxylase activity and converting L-tyrosine into L-DOPA.

[0086] The term “demethylase” as used herein refers to any suitable P450 enzyme, capable of demethylating thebaine into northebaine, thebaine into oripavine, northebaine into nororipavine and/or oripavine into nororipavine. Such a demthylase may have N-demethylation and/or O-demethyation activity. The use of demethylases herein avoids the requirement of expensive chemical demethylations and harsh conditions required for chemical-based conversion processes undesirable in the production of active pharmaceutical ingredients and their intermediates, such as BIAs. For example, the production of nororipavine requires two demethylations if generated from thebaine, and one demethylation if generated from oripavine. The substrates thebaine and/or oripavine may be provided by direct feeding to the recombinant microbial host cells (such as recombinant yeast cells) or can be generated in vivo using a recombinant pathway using glucose, tyrosine, or any intermediate between as the starting substrate. In preferred embodiments, the one or more demethylases have specificity towards producing nor-compounds and produces less by-products.

[0087] The terms “glycosylated” and “glucosylated” herein refer to the addition of a glycosyl (carbohydrate) group from a glycosyl donor. A non-limiting example of a glucose donor is UDP-glucose. A non-limiting example of a glycosyl donor protein is SEQ ID No. 899, encoded by SEQ ID No. 900. No Other carbohydrates are also suitable, for example N-acetyl glucosamine, wherein the sugar donor is Uridine diphosphate N-acetylglucosamine. Glycosyl transferases are able to glycosylate opioids and BIAs to produce opioid glycosides and BIA glycosides respectively. In one embodiment, a UDP-glucose glycosyltransferase (referred to herein as a “UGT”) is utilized that improves the recombinant cell's efficiency for converting oripavine to nororipavine and nororipavine glucoside. Suitable UGTs may display aglycone O-UGT activity and/or aglycone O-glucosyltransferase activity. Surprisingly, it has been found that glycosylation with a UGT significantly improves biomass and productivity of nororipavine producing strains (data presented by the current research group in PCT/EP2022/062130, the entire contents of which are hereby incorporated into the disclosure of the current invention). Embodiments of the current invention, may comprise one or more glycosyl transferases (UGT) selected from an amino acid sequence having at least 60%, such as at least 70%, such at least 75%, such as at least 80%, such as at least 90%, such as at least 95%, such as at least 99%, such as 100% identity to a UGT comprised in any one of SEQ ID NO: 878, 880, 882, 884, 886, 888, 890, 892, 894, 896, or 898; or encoded by a nucleic acid sequence having at least 60%, such as at least 70%, such at least 75%, such as at least 80%, such as at least 90%, such as at least 95%, such as at least 99%, such as 100% identity to SEQ ID No. 879, 881, 877, 883, 885, 887, 889, 891, 893, 895 or 897, or genomic DNA thereof.

[0088] The term “DRS” as used herein refers to 1,2-dehydroreticuline synthase, a cytochrome P450 enzyme which catalyze conversion of (S)-Reticuline into 1,2-dehydroreticuline.

[0089] The term “DRR” as used herein refers to 1,2-dehydroreticuline reductase which catalyzes conversion of 1,2-dehydroreticuline to (R)-Reticuline.

[0090] The term “DRS-DRR” as used herein refers to 1,2-dehydroreticuline synthase-1,2-dehydroreticuline reductase fused complex catalyzing conversion of (S)-Reticuline into (R)-reticuline. This complex may also be referred to as STORR or REPI. DRS-DRR or DRS together with DRR are also categorised as epimerases or isomerases.

[0091] The term “CPR” as used herein refers to a cytochrome P450 reductase catalyzing the electron transfer (from NADPH) to a cytochrome P450 enzyme of the pathway, typically in the endoplasmic reticulum of a eukaryotic cell. For distinction and as disclosed herein CPR's are divided into demethylase-CPR used for CPR's capable of reducing demethylases; DRS-CPR used for CPR's capable of reducing DRS and TH-CPR used for CPR's capable of reducing TH. Demethylase-CPR, DRS-CPR and TH-CPR may be identical or different, depending on the P450 to be reduced.

[0092] The term “Cytochrome P450 enzyme” or “P450 enzymes” or “P450” as used herein interchangeably refers to a family of monooxygenases enzymes containing heme as a cofactor. P450s are also known as “CYPs”. For distinction and as disclosed herein P450 enzymes are divided into demethylase P450s; DRS P450s, and TH P450s.

[0093] The term “DODC” and TYDC” as used herein refers to L-dopa decarboxylase and tyrosine decarboxylase respectively capable of catalyzing conversion of L-DOPA into dopamine and tyrosine into 4-HPP.

[0094] The term “MAO” as used herein refers to monoamine oxidase capable of catalyzing the conversion of dopamine to 3,4 DHPAA

[0095] The term “DHPAA” as used herein refers to 3,4-dihydroxyphenylacetaldehyde.

[0096] The term “NCS” as used herein refers to Norcoclaurine synthase capable of catalyzing conversion of dopamine and 4-HPAA into Norcoclaurine.

[0097] The term “6-OMT” as used herein refers to 6-O-methyltransferase capable of catalyzing conversion of (S)-norcoclaurine to (S)-Coclaurine

[0098] The term “CNMT” as used herein refers to Coclaurine-N-methyltransferase capable of catalyzing conversion of (S)-Coclaurine to (S)—N-Methylcoclaurine and/or (S)-3′-hydroxycoclaurine to (S)-3′-hydroxy-N-methyl-coclaurine.

[0099] The term “NMCH” as used herein refers to N-methylcoclaurine 3′-monooxygenase capable of catalyzing conversion of (S)-Coclaurine to (S)-3′-hydroxycoclaurine and/or (S)—N-Methylcoclaurine to (S)-3′-Hydroxy-N-Methylcoclaurine

[0100] The term “4′-OMT” as used herein refers to 3′-hydroxy-N-methyl-(S)-coclaurine 4′-O-methyltransferase capable of catalyzing conversion of (S)-3′-Hydroxy-N-Methylcoclaurine to (S)-reticuline.

[0101] The term “SAS” as used herein refers to salutaridine synthase capable of catalyzing conversion of (R)-reticuline to Salutaridine.

[0102] The term “SAR” as used herein refers to salutaridine reductase capable of catalyzing conversion of Salutaridine to Salutaridinol.

[0103] The term “SAT” as used herein refers to salutaridinol 7-O-acetyltransferase capable of catalyzing conversion of Salutaridinol to 7-O-acetylsalutaridinol.

[0104] The term “THS” as used herein refers to thebaine synthase capable of catalyzing conversion of 7-O-acetylsalutaridinol into thebaine.

[0105] The term “BIA” or “benzylisoquinoline alkaloid” as used herein refers to a compound of the general formula A:

[chemical structure]

[0106] which is the structural backbone of many alkaloids with a wide variety of structures, or to alkaloid products deriving from formula A of the general formula B also known as morphinans:

[chemical structure]

[0107] BIAs of relevance to some aspects of the current invention include one or more benzylisoquinoline alkaloid (such as any BIA and/or BIA derivative, BIA-glycoside, oripavine, glucosylated oripavine, gly-oripavine, thebaine, northebaine, nororipavine, gly-nororipavine, glucosylated nororipavine, nor-opioids or glycosylated noropioids).

[0108] The term “pathway” or “metabolic pathway” as used herein is intended to mean an enzyme acting in a live cell to convert a chemical substrate into a chemical product. A pathway may include one enzyme or multiple enzymes acting in sequence. A pathway including only one enzyme may also herein be referred to as “bioconversion” in particular relevant for embodiments where the cell of the invention is fed with a precursor or substrate to be converted by the enzyme into a desired benzylisoquinoline alkaloid. Enzymes are characterized by having catalytic activity, which can change the chemical structure of the substrate(s). An enzyme may have more than one substrate and produce more than one product. The enzyme may also depend on cofactors, which can be inorganic chemical compounds or organic compounds (co-factor and/or co-enzymes). The NADPH-dependent cytochrome P450 reductase (CPR) is an electron donor to cytochromes P450 (CYPs). CPR shuttles electrons from NADPH through the Flavin Adenine Dinucleotide (FAD) and Flavin Mononucleotide (FMN) coenzymes into the iron of the prosthetic heme-group of the CYP. The term “operative biosynthetic metabolic pathway” refers to a metabolic pathway that occurs in a live recombinant host, as described herein.

[0109] The term “in vivo”, as used herein refers to within a living cell or organism, including, for example animal, a plant or a microorganism.

[0110] The term “in vitro”, as used herein refers to outside a living cell or organism, including, without limitation, for example, in a microwell plate, a tube, a flask, a beaker, a tank, a reactor and the like.

[0111] The term “in planta”, as used herein refers to within a plant or plant cell.

[0112] The term “substrate” or “precursor”, as used herein refers to any compound that can be converted into a different compound. For example, thebaine can be a substrate for P450 and can be converted by demethylation into northebaine. For clarity, substrates and/or precursors include both compounds generated in situ by a enzymatic reaction in a cell or exogenously provided compounds, such as exogenously provided organic molecules which the host cell can metabolize into a desired compound.

[0113] The term “endogenous” or “native” as used herein refers to a gene or a polypeptide in a host cell which originates from the same host cell. A cell comprising only endogenous or native genes linked to their native promoters and no recombinant vectors present with extraneous copies will have a “normal” or “typical” phenotype and is referred to by those skilled in the art as “wild type”.

[0114] The term “heterologous”, “recombinant”, “genetically modified”, “exogenous” or “non-native” as used herein refers to a polynucleotide, gene or a polypeptide artificially engineered into a host cell that does not normally poses that polynucleotide, gene or polypeptide. As used herein, the term “recombinant polynucleotide sequence” refers to a polynucleotide not found in the wild type cell, and may comprise, for example an endogenous gene linked to a promoter to which it is not operably linked in the wild type cell (i.e. a different native promoter or a heterologous promoter), or a heterologous gene. For example, addition of a heterologous gene permits a recombinant host cell to express the protein encoded by that gene that was not previously part of its wild type genotype; i.e. the heterologous gene originates from a different cell, such as a different strain, variety or species. As used herein, a heterologous polynucleotide may comprise a heterologous gene and/or a different promoter (such as a heterologous promoter, an inducible promoter, a constitutive promoter, a native promoter of higher or weaker strength), etc. Thus, depending on the genetic modification introduced within a host cell, a heterologous polynucleotide may result in the host cell being able to express a heterologous protein, or may result in functional disruption of a native gene, or may result in a native gene being expressed differently to in the wild type cell, such that it may have up-regulated expression (overexpression), down-regulated expression (underexpressed) or inducibly expressed when compared to the wild type host cell.

[0115] The term “functional disruption” as used herein refers to manipulation of a gene or any of the machinery participating in the expression the gene, so that said gene no longer expresses a functional version (i.e. not capable of performing the same functions or catalysis) of the polypeptide normally encoded by the unmodified gene in the host cell. Examples of functional disruption include partial or full deletion, frameshift mutation, insertion, removal of part or all of the promoter, or antisense technology. The term “deletion” as used herein refers to manipulation of a gene so that it is no longer expressed in a host cell.

[0116] The term “down-regulation”, “down-regulated expression”, and “underexpression” are used interchangeably herein and are understood by one skilled in the art to refer to manipulation of a gene or any of the machinery participating in the expression the gene, so that expression of the gene is reduced as compared to expression without the manipulation.

[0117] The term “up-regulation”, “up-regulated expression”, and “overexpression” are used interchangeably herein and are understood by one skilled in the art to refer to manipulation of a gene or any of the machinery participating in the expression the gene, so that expression of the gene is increased as compared to expression without the manipulation.

[0118] The term “recombinant host cell” is understood by those skilled in the art to be a cell that has been genetically modified through the deliberate modification of DNA in the cell's genome. As known in the art, recombinant polynucleotide (e.g. DNA) molecules are polynucleotide (e.g. DNA) molecules formed by laboratory methods of genetic recombination (such as molecular cloning) to bring together genetic material from multiple sources, creating sequences that would not otherwise be found in biological organisms. The terms “strain” and “cell” are used interchangeably herein.

[0119] As used herein, the terms “influx” or “uptake” refer to movement or pumping of a substrate (such as a BIA) into a cell, and the term “efflux” or “excretion” refers to movement or pumping of a substrate (such as a BIA) out of a cell. In aspects of the current invention, the substrates to be effluxed out of the recombinant microbial host cell is one or more substrate selected from a BIA, BIA-glycoside, oripavine, thebaine, northebaine, nororipavine or glycosylated nororipavine or glucosylated nororipavine.

[0120] The terms “ABC transport protein” and “ABC transporter” as used interchangeably herein, refers to a class of ATP-dependent pumps, as recognised by those skilled in the art that comprise an ATP-binding cassette (ABC). The presence of the ATP-binding cassette allows identification of ABC transporters by sequence homology searches to the consensus sequence of the conserved ATP-binding cassette, commonly referred to by those skilled in this art as Walker A sequence (also called the P-loop motif because of its role in phosphate binding) and a downstream more variable Walker B sequence. The Walker A sequence has the consensus sequence G-x(4)-GK-[T/S], where G, K, T and S denote glycine, lysine, threonine and serine residues respectively, and x denotes any amino acid. The Walker B sequence is far more variable, but always comprises a negatively charged residue following a stretch of bulky, hydrophobic amino acids. A somewhat conserved “Linker” sequence, also known as an “S” or “C” sequence, is present in between the Walker A and Walker B motifs, which reside in cytosolic region of the cell.

[0121] The term “BIA efflux transporter” as used herein refers to a superfamily of ABC transport proteins capable of moving a BIA across a cellular membrane to efflux it out of the cell. i.e. such that the concentration of said intermediate is increased outside of the host cell relative to inside the host cell. In some aspects, the one or more benzylisoquinoline alkaloid and/or BIA derivative is selected from one or more BIA, BIA-glycoside, oripavine, glucosylated oripavine, gly-oripavine, thebaine, northebaine, nororipavine, gly-nororipavine, glucosylated nororipavine, nor-opioids or glycosylated noropioids. In aspects of the current invention, ABC transport protein capable of effluxing one or more BIA, BIA-glycoside, oripavine, thebaine, northebaine, nororipavine or glycosylated nororipavine or glucosylated nororipavine from the recombinant microbial host cell, comprises a Walker A sequence G(A/S/R)(S/T)GAGK(S/T), a linker sequence (L/V)SGG(E/Q), and a Walker B sequence comprising four hydrophobic residues, an optional additional fifth hydrophobic residue and a D such that (I/L)(I/L)(I/V/L)(F/L/M)XD where X represents the optional additional hydrophobic residue or no additional residue. In some aspects, the one or more benzylisoquinoline alkaloid (such as BIA and/or BIA derivative, BIA-glycoside, oripavine, glucosylated oripavine, gly-oripavine, thebaine, northebaine, nororipavine, gly-nororipavine, glucosylated nororipavine, nor-opioids or glycosylated noropioids) efflux transporters of the current invention are ABC transporters. In many aspects, the ABC transporters of the current invention have been selected on the basis of increased specificity for the BIAs and/or BIA derivatives produced by the recombinant host cell (one or more BIA, BIA-glycoside, oripavine, glucosylated oripavine, gly-oripavine, thebaine, northebaine, nororipavine, gly-nororipavine, glucosylated nororipavine, nor-opioids or glycosylated noropioids) compared to one or more intermediate molecules in or substrates fed to the BIA-producing biosynthetic pathway engineered into the recombinant host cell. Examples of BIA efflux transporters as described herein include but are not limited to ABC transporter polypeptides comprising a sequence having at least 45%, such as at least 60%, such as at least 70%, such as at least 80%, such as at least 85%, such as at least 90%, such as at least 95%, such as at least 99%, such as 100% identity to any of SEQ ID No, 872, 910, 912, 914, 916, 918, 920, 922, 924, 926, 928, 930, 932, 934, 936, 938, 940, 942, 956, 960, 962, 964, 966, 970, 976, 980, 986, 988, 990, 994, 996, 1010, 1012, 1018, 1020, 1022, 1026, 1028, 1030, 1032, 1034, 1038, or 1040, or is encoded by a nucleic acid sequence having at least 45%, such as at least 60%, such as at least 70%, such as at least 80%, such as at least 85%, such as at least 90%, such as at least 95%, such as at least 99%, such as 100% identity to any of SEQ ID No. 871, 909, 911, 913, 915, 947, 919, 921, 923, 925, 927, 929, 931, 933, 935, 937, 939 or 941, 955, 959, 961, 963, 965, 969, 975, 979, 985, 987, 989, 993, 995, 1009, 1011, 1017, 1019, 1021, 1025, 1027, 1029, 1031, 1033, 1037, 1039 or genomic DNA thereof.

[0122] In some aspects, BIA (one or more BIA, BIA-glycoside, oripavine, glucosylated oripavine, gly-oripavine, thebaine, northebaine, nororipavine, gly-nororipavine, glucosylated nororipavine, nor-opioids or glycosylated noropioids) efflux transporters are members of the ABCC/multi-drug resistance associated protein (MRP) subfamily of ABC transporters. In some aspects, the current inventions provides recombinant microbial host cells capable of producing one or more benzylisoquinoline alkaloid (BIA, BIA-glycoside, oripavine, thebaine, northebaine, nororipavine or glycosylated nororipavine or glucosylated nororipavine), comprising BIA efflux transporters of the ABCC sub-family of ABC transporters, comprising Walker A sequences G(X)(I/V)G(S/T)GK where X is a residue selected from P, L, S, A, V or M and GRTGAGK, two linker sequences comprising LSGGQ and NFSLGE, and Walker B sequences (I/V/T)(I/Y/V)L(M/F/L)D and I(I/L)(I/V)(L/M)D. In some aspects, the current inventions provides recombinant microbial host cells capable of producing one or more benzylisoquinoline alkaloid (BIA, BIA-glycoside, oripavine, thebaine, northebaine, nororipavine or glycosylated nororipavine or glucosylated nororipavine), comprising BIA efflux transporters of the ABCC sub-family of ABC transporters, wherein the ABCC/multi-drug resistance associated protein (MRP) ABC transporter is a polypeptide comprising a sequence having at least 45%, such as at least 60%, such as at least 70%, such as at least 80%, such as at least 85%, such as at least 90%, such as at least 95%, such as at least 99%, such as 100% identity to SEQ ID No. 872, 910, 912, 914, 918, 920, 922, 924, 926, 928, 930, 932, 934, 936, 938, 940, 942, 956, 960, 962, 964, 966, 970, 1032, 1034, or 1040, or encoded by a nucleic acid sequence having at least 45%, such as at least 60%, such as at least 70%, such as at least 80%, such as at least 85%, such as at least 90%, such as at least 95%, such as at least 99%, such as 100% identity to SEQ ID No. 871, 909, 911, 913, 917, 919, 921, 923, 925, 927, 929, 931, 933, 935, 937, 939, 941, 955, 959, 961, 963, 965, 969, 1031, 1033 or 1039, or genomic DNA thereof.

[0123] In some aspects, BIA (such as BIA-glycoside, oripavine, thebaine, northebaine, nororipavine or gly-nororipavine or glucosylated nororipavine) efflux transporters are members of the members of the ABCG/pleiotropic drug resistance (PDR) subfamily of ABC transporters. In some aspects, the current inventions provides recombinant microbial host cells capable of producing BIAs of relevance to some aspects of the current invention include one or more benzylisoquinoline alkaloid (such as any BIA and/or BIA derivative, BIA-glycoside, oripavine, glucosylated oripavine, gly-oripavine, thebaine, northebaine, nororipavine, gly-nororipavine, glucosylated nororipavine, nor-opioids or glycosylated noropioids), comprising BIA efflux transporters of the ABCG/pleiotropic drug resistance (PDR) subfamily of ABC transporters comprising Walker A sequences GRPGSGC(S/T) and G(A/S)SGAGKT, S sequences VSGGERKRVSIA and LNVEQRKRLTIG, and Walker B sequences (F/L)QCWD and LL(V/L)F(L/F)D. In some aspects, the current inventions provides recombinant microbial host cells capable of producing one or more benzylisoquinoline alkaloid (BIA, BIA-glycoside, oripavine, glucosylated oripavine, gly-oripavine, thebaine, northebaine, nororipavine, gly-nororipavine, glucosylated nororipavine, nor-opioids or glycosylated noropioids), comprising BIA efflux transporters of the ABCG/pleiotropic drug resistance (PDR) subfamily of ABC transporters, wherein the ABCG (PDR) ABC transporter is a polypeptide comprising a sequence having at least 45%, such as at least 60%, such as at least 70%, such as at least 80%, such as at least 85%, such as at least 90%, such as at least 95%, such as at least 99%, such as 100% identity to a polypeptide comprising a sequence having at least 45%, such as at least 60%, such as at least 75%, such as at least 80%, such as at least 85%, such as at least 90%, such as at least 95%, such as at least 99%, such as 100% identity to SEQ ID No. 916, 976, 980, 986, 988, 990, 994, 996, 1010, 1012, 1018, 1020, 1022, 1026, 1028, 1030 or 1038, or encoded by a nucleic acid sequence having at least 70%, such as at least 80%, such as at least 85%, such as at least 90%, such as at least 95%, such as at least 99%, such as 100% identity to SEQ ID No. 915, 975, 979, 985, 987, 989, 993, 995, 1009, 1011, 1017, 1019, 1021, 1025, 1027, 1029 or 1037 or genomic DNA thereof.

[0124] The terms “substantially” or “approximately” or “about”, as used herein refers to a reasonable deviation around a value or parameter such that the value or parameter is not significantly changed. These terms of deviation from a value should be construed as including a deviation of the value where the deviation would not negate the meaning of the value deviated from. For example, in relation to a reference numerical value the terms of degree can include a range of values plus or minus 10% from that value. For example, deviation from a value can include a specified value plus or minus a certain percentage from that value, such as plus or minus 9%, 8%, 7%, 6%, 5%, 4%, 3%, 2%, or 1% from the specified value.

[0125] The term “and/or” as used herein is intended to represent an inclusive “or”. The wording X and/or Y is meant to mean both X or Y and X and Y. Further the wording X, Y and/or Z is intended to mean X, Y and Z alone or any combination of X, Y, and Z.

[0126] The term “isolated” as used herein about a compound, refers to any compound, which by means of human intervention, has been put in a form or environment that differs from the form or environment in which it is found in nature. Isolated compounds include but is no limited to compounds of the invention for which the ratio of the compounds relative to other constituents with which they are associated in nature is increased or decreased. In an important embodiment the amount of compound is increased relative to other constituents with which the compound is associated in nature. In an embodiment the compound of the invention may be isolated into a pure or substantially pure (“purified”) form. In this context a substantially pure compound means that the compound is separated from other extraneous or unwanted material present from the onset of producing the compound or generated in the manufacturing process. Such a substantially pure compound preparation contains less than 10%, such as less than 8%, such as less than 6%, such as less than 5%, such as less than 4%, such as less than 3%, such as less than 2%, such as less than 1%, such as less than 0.5% by weight of other extraneous or unwanted material usually associated with the compound when expressed natively or recombinantly. In an embodiment the isolated compound is at least 90% pure, such as at least 91% pure, such as at least 92% pure, such as at least 93% pure, such as at least 94% pure, such as at least 95% pure, such as at least 96% pure, such as at least 97% pure, such as at least 98% pure, such as at least 99% pure, such as at least 99.5% pure, such as 100% pure by weight.

[0127] The term “non-naturally occurring” as used herein about a substance, refers to any substance that is not normally found in nature or natural biological systems. In this context the term “found in nature or in natural biological systems” does not include the finding of a substance in nature resulting from releasing the substance to nature by deliberate or accidental human intervention. Non-naturally occurring substances may include substances completely or partially synthetized by human intervention and/or substances prepared by human modification of a natural substance.

[0128] The term “Sequence Identity” as used herein considers the degree of sequence similarity or relatedness between two amino acid sequences or between two nucleotide sequences. The term “% identity” is used herein as a quantifiable measure of the Sequence Identity or relatedness between two amino acid sequences or between two nucleotide sequences. More precisely, the term “% identity” as used herein about amino acid or nucleotide sequences refers to the degree of identity in percent between two amino acid sequences obtained when using the Needleman-Wunsch algorithm (Needleman and Wunsch, 1970, J. Mol. Biol. 48:443-453) as implemented in the Needle program of the EMBOSS package (EMBOSS: The European Molecular Biology Open Software Suite, Rice et al., 2000, Trends Genet. 16:276-277), preferably version 5.0.0 or later. The parameters used are gap open penalty of 10, gap extension penalty of 0.5, and the EBLOSUM62 (EMBOSS version of BLOSUM62) substitution matrix. The output of Needle labeled “longest identity” (obtained using the −nobrief option) is used as the percent identity and is calculated as follows:

$$\frac{identical amino acid residues}{Length of alignment - total number of gaps in alignment} \times 100$$

[0129] The term “% identity” as used herein about nucleotide sequences refers to the degree of identity in percent between two nucleotide sequences obtained when using the Needleman-Wunsch algorithm (Needleman and Wunsch, 1970, supra) as implemented in the Needle program of the EMBOSS package (EMBOSS: The European Molecular Biology Open Software Suite, Rice et al., 2000, supra), preferably version 5.0.0 or later. The parameters used are gap open penalty of 10, gap extension penalty of 0.5, and the EDNAFULL (EMBOSS version of NCBI NUC4.4) substitution matrix. The output of Needle labeled “longest identity” (obtained using the −nobrief option) is used as the percent identity and is calculated as follows:

$$\frac{identical deoxyribonucleotides}{Length of alignment - total number of gaps in alignment} \times 100$$

[0130] The protein sequences of the present invention can further be used as a “query sequence” to perform a search against sequence databases, for example to identify other family members or related sequences. Such searches can be performed using the BLAST programs. Software for performing BLAST analyses is publicly available through the National Center for Biotechnology Information (http://www.ncbi.nlm.nih.gov). BLASTP is used for amino acid sequences and BLASTN for nucleotide sequences. The BLAST program uses as defaults:
[0131] Cost to open gap: default=5 for nucleotides/11 for proteins
[0132] Cost to extend gap: default=2 for nucleotides/1 for proteins
[0133] Penalty for nucleotide mismatch: default=−3
[0134] Reward for nucleotide match: default=1
[0135] Expect value: default=10
[0136] Wordsize: default=11 for nucleotides/28 for megablast/3 for proteins.

[0137] Furthermore, the degree of local identity between the amino acid sequence query or nucleic acid sequence query and the retrieved homologous sequences is determined by the BLAST program. However only those sequence segments are compared that give a match above a certain threshold. Accordingly, the program calculates the identity only for these matching segments. Therefore, the identity calculated in this way is referred to as local identity. Alternatively, % identity for any candidate nucleic acid or amino acid sequence relative to a reference sequence can be determined as follows. A reference sequence (e.g., a nucleic acid sequence or an amino acid sequence described herein) is aligned to one or more candidate sequences using the computer program Clustal Omega (version 1.2.1, default parameters), which allows alignments of nucleic acid or polypeptide sequences to be carried out across their entire length (global alignment). Chenna et al., 2003, Nucleic Acids Res. 31 (13): 3497-500.

[0138] Clustal Omega calculates the best match between a reference and one or more candidate sequences, and aligns them so that identities, similarities and differences can be determined. Gaps of one or more residues can be inserted into a reference sequence, a candidate sequence, or both, to maximize sequence alignments. For fast pairwise alignment of nucleic acid sequences, the following default parameters are used: word size: 2; window size: 4; scoring method: % age; number of top diagonals: 4; and gap penalty: 5. For multiple alignment of nucleic acid sequences, the following parameters are used: gap opening penalty: 10.0; gap extension penalty: 5.0; and weight transitions: yes. For fast pairwise alignment of protein sequences, the following parameters are used: word size: 1; window size: 5; scoring method: % age; number of top diagonals: 5; gap penalty: 3. For multiple alignment of protein sequences, the following parameters are used: weight matrix: blosum; gap opening penalty: 10.0; gap extension penalty: 0.05; hydrophilic gaps: on; hydrophilic residues: Gly, Pro, Ser, Asn, Asp, Gin, Glu, Arg, and Lys; residue-specific gap penalties: on. The Clustal Omega output is a sequence alignment that reflects the relationship between sequences. Clustal Omega can be run, for example, at the Baylor College of Medicine Search Launcher site on the World Wide Web (searchlauncher.bcm.tmc.edu/multi-align/multi-align.html) and at the European Bioinformatics Institute site at http://www.ebi.ac.uk/Tools/msa/clustalo/. To determine a % identity of a candidate nucleic acid or amino acid sequence to a reference sequence, the sequences are aligned using Clustal Omega, the number of identical matches in the alignment is divided by the length of the reference sequence, and the result is multiplied by 100. It is noted that the % identity value can be rounded to the nearest tenth. For example, 78.11, 78.12, 78.13, and 78.14 are rounded down to 78.1, while 78.15, 78.16, 78.17, 78.18, and 78.19 are rounded up to 78.2.

[0139] The term “mature polypeptide” or “mature enzyme” as used herein refers to a polypeptide in its final active form following translation and any post-translational modifications, such as N-terminal processing, C-terminal truncation, glycosylation, phosphorylation, etc. It is known in the art that a host cell may produce a mixture of two of more different mature polypeptides (i.e., with a different C-terminal and/or N-terminal amino acid) expressed by the same polynucleotide.

[0140] The term “cDNA” refers to a DNA molecule that can be prepared by reverse transcription from a mature, spliced, mRNA molecule obtained from a eukaryotic or prokaryotic cell. cDNA lacks intron sequences that may be present in the corresponding genomic DNA. The initial, primary RNA transcript is a precursor to mRNA that is processed through a series of steps, including splicing, before appearing as mature spliced mRNA.

[0141] The term “coding sequence” refers to a nucleotide sequence, which directly specifies the amino acid sequence of a polypeptide. The boundaries of the coding sequence are generally determined by an open reading frame, which begins with a start codon such as ATG, GTG, or TTG and ends with a stop codon such as TAA, TAG, or TGA. The coding sequence may be a genomic DNA, cDNA, synthetic DNA, or a combination thereof.

[0142] The term “control sequence” as used herein refers to a nucleotide sequence necessary for expression of a polynucleotide encoding a polypeptide. A control sequence may be native (i.e., from the same gene) or heterologous or foreign (i.e., from a different gene) to the polynucleotide encoding the polypeptide. Control sequences include, but are not limited to leader sequences, polyadenylation sequence, pro-peptide coding sequence, promoter sequences, signal peptide coding sequence, translation terminator (stop) sequences and transcription terminator (stop) sequences. To be operational control sequences usually must include promoter sequences, transcriptional and translational stop signals. Control sequences may be provided with linkers for the purpose of introducing specific restriction sites facilitating ligation of the control sequences with a coding region of a polynucleotide encoding a polypeptide.

[0143] The term “expression” includes any step involved in the production of a polypeptide including, but not limited to, transcription, post-transcriptional modification, translation, post-translational modification, and secretion.

[0144] The term “expression vector” refers to a DNA molecule, either single- or double stranded, either linear or circular, which comprises a polynucleotide encoding a polypeptide and is operably linked to control sequences that provide for its expression. Expression vectors include expression cassettes for the integration of genes into a host cell as well as plasmids and/or chromosomes comprising such genes.

[0145] The term “host cell” refers to any cell type that is susceptible to transformation, transfection, transduction, or the like with a nucleic acid construct or expression vector comprising a polynucleotide of the present invention. Host cell encompasses any progeny of a parent cell that is not identical to the parent cell due to mutations that occur during replication.

[0146] The term “polynucleotide construct” refers to a polynucleotide, either single- or double stranded, which is isolated from a naturally occurring gene or is modified to contain segments of nucleic acids in a manner that would not otherwise exist in nature or which is synthetic, and which comprises a polynucleotide encoding a polypeptide and one or more control sequences.

[0147] The term “operably linked” refers to a configuration in which a control sequence is placed at an appropriate position relative to the coding polynucleotide such that the control sequence directs expression of the coding polynucleotide.

[0148] The terms “nucleotide sequence and “polynucleotide” are used herein interchangeably.

[0149] The term “comprise” and “include” as used throughout the specification and the accompanying items as well as variations such as “comprises”, “comprising”, “includes” and “including” are to be interpreted inclusively. These words are intended to convey the possible inclusion of other elements or integers not specifically recited, where the context allows.

[0150] The articles “a” and “an” are used herein refers to one or to more than one (i.e. to one or at least one) of the grammatical object of the article. By way of example, “an element” may mean one element or more than one element.

[0151] Terms like “preferably”, “commonly”, “particularly”, and “typically” are not utilized herein to limit the scope of the itemed invention or to imply that certain features are critical, essential, or even important to the structure or function of the itemed invention. Rather, these terms are merely intended to highlight alternative or additional features that can or cannot be utilized in a particular embodiment of the present invention.

[0152] The term “cell culture” as used herein refers to a culture medium comprising a plurality of host cells of the invention. A cell culture may comprise a single strain of host cells or may comprise two or more distinct host cell strains. The culture medium may be any medium that may comprise a recombinant host, e.g., a liquid medium (i.e., a culture broth) or a semi-solid medium, and may comprise additional components, e.g., a carbon source such as dextrose, sucrose, glycerol, or acetate; a nitrogen source such as ammonium sulfate, urea, or amino acids; a phosphate source; vitamins; trace elements; salts; amino acids; nucleobases; yeast extract; aminoglycoside antibiotics such as G418 and hygromycin B.

[0153] All methods described herein can be performed in any suitable order of steps unless otherwise indicated herein or otherwise clearly contradicted by context. The use of any and all examples, or exemplary language (e.g., “such as”) provided herein is intended merely to better illuminate the invention and does not pose a limitation on the scope of the invention otherwise claimed. No language in the specification should be construed as indicating any non-claimed element essential to the practice of the invention.

[0154] All percentages, ratios and proportions herein are by weight, unless otherwise specified. A weight percent (weight %, also as wt. %) of a component, unless specifically stated to the contrary, is based on the total weight of the composition in which the component is included (e.g., on the total amount of the reaction mixture).

[0155] Terms used herein may be preceded and/or followed by a single dash, “ ”, or a double dash, “=”, to indicate the bond order of the bond between the named substituent and its parent moiety; a single dash indicates a single bond and a double dash indicates a double bond or a pair of single bonds in the case of a spiro-substituent. In the absence of a single or double dash it is understood that a single bond is formed between the substituent and its parent moiety; further, substituents are intended to be read “left to right” with reference to the chemical structure referred to unless a dash indicates otherwise. For example, arylalkyl, arylalkyl-, and alkylaryl indicate the same functionality.

[0156] For simplicity, chemical moieties are defined and referred to throughout primarily as univalent chemical moieties (e.g., alkyl, aryl, etc.). Nevertheless, such terms are also used to convey corresponding multivalent moieties under the appropriate structural circumstances clear to those skilled in the art. For example, while an “alkyl” moiety can refer to a monovalent radical (e.g. CH3-CH2-), in some circumstances a bivalent linking moiety can be “alkyl,” in which case those skilled in the art will understand the alkyl to be a divalent radical (e.g., —CH2-CH2-), which is equivalent to the term “alkylene.” (Similarly, in circumstances in which a divalent moiety is required and is stated as being “aryl,” those skilled in the art will understand that the term “aryl” refers to the corresponding divalent moiety, arylene). All atoms are understood to have their normal number of valences for bond formation (i.e., 4 for carbon, 3 for N, 2 for O, and 2, 4, or 6 for S, depending on the oxidation state of the S). Nitrogens in the presently disclosed compounds can be hypervalent, e.g., an N-oxide or tetrasubstituted ammonium salt. On occasion a moiety may be defined, for example, as —B-(A)a, wherein a is 0 or 1. In such instances, when a is 0 the moiety is —B and when a is 1 the moiety is —B-A.

[0157] As used herein, the term “alkyl” or “alkane” includes a saturated hydrocarbon having a designed number of carbon atoms, such as 1 to 40 carbons (i.e., inclusive of 1 and 40), 1 to 35 carbons, 1 to 25 carbons, 1 to 20 carbons, or 1, 2, 3, 4, 5, 6, 7, 8, 9, 10, 11, 12, 13, 14, 15, 16, 17, or 18. Alkyl groups or alkanes may be straight or branched and depending on context, may be a monovalent radical or a divalent radical (i.e., an alkylene group). For example, the moiety “—(C1 C6 alkyl)O—” signifies connection of an oxygen through an alkylene bridge having from 1 to 6 carbons and C1-C3 alkyl represents methyl, ethyl, and propyl moieties. Examples of “alkyl” include, for example, methyl, ethyl, propyl, isopropyl, butyl, iso, sec and tert butyl, pentyl, and hexyl. Examples of “alkane” include, for example, methane, ethane, propane, isopropane, butane, isobutane, sec-butane, tert-butane, pentane, hexane, heptane, and octane.

[0158] The term “alkoxy” represents an alkyl group of indicated number of carbon atoms attached to the parent molecular moiety through an oxygen bridge. Examples of “alkoxy” include, for example, methoxy, ethoxy, propoxy, and isopropoxy.

[0159] The term “alkenyl” as used herein, unsaturated hydrocarbon containing from 2 to 10 carbons (i.e., inclusive of 2 and 10), 2 to 8 carbons, 2 to 6 carbons, or 2, 3, 4, 5 or 6, unless otherwise specified, and containing at least one carbon-carbon double bond. Alkenyl group may be straight or branched and depending on context, may be a monovalent radical or a divalent radical (i.e., an alkenylene group). For example, the moiety “—(C2 C6 alkenyl)O—” signifies connection of an oxygen through an alkenylene bridge having from 2 to 6 carbons. Representative examples of alkenyl include, but are not limited to, ethenyl, 2-propenyl, 2-methyl-2-propenyl, 3-butenyl, 4-pentenyl, 5-hexenyl, 2-heptenyl, 2-methyl-1-heptenyl, 3-decenyl, and 3,7-dimethylocta-2,6-dienyl.

[0160] The term “alkynyl” as used herein, unsaturated hydrocarbon containing from 2 to 10 carbons (i.e., inclusive of 2 and 10), 2 to 8 carbons, 2 to 6 carbons, or 2, 3, 4, 5 or 6 unless otherwise specified, and containing at least one carbon-carbon triple bond. Alkynyl group may be straight or branched and depending on context, may be a monovalent radical or a divalent radical (i.e., an alkynylene group). For example, the moiety “—(C2 C6 alkynyl)O—” signifies connection of an oxygen through an alkynylene bridge having from 2 to 6 carbons. Representative examples of alkynyl include, but are not limited to, acetylenyl, 1-propynyl, 2-propynyl, 3-butynyl, 2-pentynyl, and 1-butynyl.

[0161] The term “aryl” represents an aromatic ring system having a single ring (e.g., phenyl) which is optionally fused to other aromatic hydrocarbon rings or non-aromatic hydrocarbon or heterocyclic rings. “Aryl” includes ring systems having multiple condensed rings and in which at least one is carbocyclic and aromatic, (e.g., 1,2,3,4 tetrahydronaphthyl, naphthyl). Examples of aryl groups include phenyl, 1 naphthyl, 2 naphthyl, indanyl, indenyl, dihydronaphthyl, fluorenyl, tetralinyl, and 6,7,8,9-tetrahydro-5H-benzo[a]cycloheptenyl. “Aryl” also includes ring systems having a first carbocyclic, aromatic ring fused to a nonaromatic heterocycle, for example, 1H-2,3 dihydrobenzofuranyl and tetrahydroisoquinolinyl. The aryl groups herein are unsubstituted or, when specified as “optionally substituted”, can unless stated otherwise be substituted in one or more substitutable positions with various groups as indicated.

[0162] The term “heteroaryl” refers to an aromatic ring system containing at least one aromatic heteroatom selected from nitrogen, oxygen and sulfur in an aromatic ring. Most commonly, the heteroaryl groups will have 1, 2, 3, or 4 heteroatoms. The heteroaryl may be fused to one or more non-aromatic rings, for example, cycloalkyl or heterocycloalkyl rings, wherein the cycloalkyl and heterocycloalkyl rings are described herein. In one embodiment of the present compounds the heteroaryl group is bonded to the remainder of the structure through an atom in a heteroaryl group aromatic ring. In another embodiment, the heteroaryl group is bonded to the remainder of the structure through a non-aromatic ring atom. Examples of heteroaryl groups include, for example, pyridyl, pyrimidinyl, quinolinyl, benzothienyl, indolyl, indolinyl, pyridazinyl, pyrazinyl, isoindolyl, isoquinolyl, quinazolinyl, quinoxalinyl, phthalazinyl, imidazolyl, isoxazolyl, pyrazolyl, oxazolyl, thiazolyl, indolizinyl, indazolyl, benzothiazolyl, benzimidazolyl, benzofuranyl, furanyl, thienyl, pyrrolyl, oxadiazolyl, thiadiazolyl, benzo[1,4]oxazinyl, triazolyl, tetrazolyl, isothiazolyl, naphthyridinyl, isochromanyl, chromanyl, isoindolinyl, isobenzothienyl, benzoxazolyl, pyridopyridinyl, purinyl, benzodioxolyl, triazinyl, pteridinyl, benzothiazolyl, imidazopyridinyl, imidazothiazolyl, benzisoxazinyl, benzoxazinyl, benzopyranyl, benzothiopyranyl, chromonyl, chromanonyl, pyridinyl N-oxide, isoindolinonyl, benzodioxanyl, benzoxazolinonyl, pyrrolyl N-oxide, pyrimidinyl N-oxide, pyridazinyl N-oxide, pyrazinyl N-oxide, quinolinyl N-oxide, indolyl N-oxide, indolinyl N-oxide, isoquinolyl N-oxide, quinazolinyl N-oxide, quinoxalinyl N-oxide, phthalazinyl N-oxide, imidazolyl N-oxide, isoxazolyl N-oxide, oxazolyl N-oxide, thiazolyl N-oxide, indolizinyl N-oxide, indazolyl N-oxide, benzothiazolyl N-oxide, benzimidazolyl N-oxide, pyrrolyl N-oxide, oxadiazolyl N-oxide, thiadiazolyl N-oxide, triazolyl N-oxide, tetrazolyl N-oxide, benzothiopyranyl S oxide, benzothiopyranyl S,S dioxide. Preferred heteroaryl groups include pyridyl, pyrimidyl, quinolinyl, indolyl, pyrrolyl, furanyl, thienyl and imidazolyl, pyrazolyl, indazolyl, thiazolyl and benzothiazolyl. In certain embodiments, each heteroaryl is selected from pyridyl, pyrimidinyl, pyridazinyl, pyrazinyl, imidazolyl, isoxazolyl, pyrazolyl, oxazolyl, thiazolyl, furanyl, thienyl, pyrrolyl, oxadiazolyl, thiadiazolyl, triazolyl, tetrazolyl, isothiazolyl, pyridinyl N-oxide, pyrrolyl N-oxide, pyrimidinyl N-oxide, pyridazinyl N-oxide, pyrazinyl N-oxide, imidazolyl N-oxide, isoxazolyl N-oxide, oxazolyl N-oxide, thiazolyl N-oxide, pyrrolyl N-oxide, oxadiazolyl N-oxide, thiadiazolyl N-oxide, triazolyl N-oxide, and tetrazolyl N-oxide. Preferred heteroaryl groups include pyridyl, pyrimidyl, quinolinyl, indolyl, pyrrolyl, furanyl, thienyl, imidazolyl, pyrazolyl, indazolyl, thiazolyl and benzothiazolyl. The heteroaryl groups herein are unsubstituted or, when specified as “optionally substituted”, can unless stated otherwise be substituted in one or more substitutable positions with various groups, as indicated.

[0163] The term “heterocycloalkyl” refers to a non-aromatic ring or ring system containing at least one heteroatom that is preferably selected from nitrogen, oxygen and sulfur, wherein said heteroatom is in a non-aromatic ring. The heterocycloalkyl may have 1, 2, 3 or 4 heteroatoms. The heterocycloalkyl may be saturated (i.e., a heterocycloalkyl) or partially unsaturated (i.e., a heterocycloalkenyl). Heterocycloalkyl includes monocyclic groups of three to eight annular atoms as well as bicyclic and polycyclic ring systems, including bridged and fused systems, wherein each ring includes three to eight annular atoms. The heterocycloalkyl ring is optionally fused to other heterocycloalkyl rings and/or non-aromatic hydrocarbon rings. In certain embodiments, the heterocycloalkyl groups have from 3 to 7 members in a single ring. In other embodiments, heterocycloalkyl groups have 5 or 6 members in a single ring. In some embodiments, the heterocycloalkyl groups have 3, 4, 5, 6 or 7 members in a single ring. Examples of heterocycloalkyl groups include, for example, azabicyclo[2.2.2]octyl (in each case also “quinuclidinyl” or a quinuclidine derivative), azabicyclo[3.2.1]octyl, 2,5-diazabicyclo[2.2.1]heptyl, morpholinyl, thiomorpholinyl, thiomorpholinyl S oxide, thiomorpholinyl S,S dioxide, 2 oxazolidonyl, piperazinyl, homopiperazinyl, piperazinonyl, pyrrolidinyl, azepanyl, azetidinyl, pyrrolinyl, tetrahydropyranyl, piperidinyl, tetrahydrofuranyl, tetrahydrothienyl, 3,4-dihydroisoquinolin-2(1H)-yl, isoindolindionyl, homopiperidinyl, homomorpholinyl, homothiomorpholinyl, homothiomorpholinyl S,S dioxide, oxazolidinonyl, dihydropyrazolyl, dihydropyrrolyl, dihydropyrazinyl, dihydropyridinyl, dihydropyrimidinyl, dihydrofuryl, dihydropyranyl, imidazolidonyl, tetrahydrothienyl S oxide, tetrahydrothienyl S,S dioxide and homothiomorpholinyl S oxide. Especially desirable heterocycloalkyl groups include morpholinyl, 3,4-dihydroisoquinolin-2(1H)-yl, tetrahydropyranyl, piperidinyl, aza bicyclo[2.2.2]octyl, γ butyrolactonyl (i.e., an oxo substituted tetrahydrofuranyl), γ butryolactamyl (i.e., an oxo substituted pyrrolidine), pyrrolidinyl, piperazinyl, azepanyl, azetidinyl, thiomorpholinyl, thiomorpholinyl S,S dioxide, 2 oxazolidonyl, imidazolidonyl, isoindolindionyl, piperazinonyl. The heterocycloalkyl groups herein are unsubstituted or, when specified as “optionally substituted”, can unless stated otherwise be substituted in one or more substitutable positions with various groups, as indicated.

[0164] The term “cycloalkyl” or “cycloalkane” refers to a non-aromatic carbocyclic ring or ring system, which may be saturated (i.e., a cycloalkyl, a cycloalkane) or partially unsaturated (i.e., a cycloalkenyl). The cycloalkyl ring can be optionally fused to or otherwise attached (e.g., bridged systems) to other cycloalkyl rings. Certain examples of cycloalkyl groups or cycloalkanes present in the disclosed compounds have from 3 to 7 members in a single ring, such as having 5 or 6 members in a single ring. In some embodiments, the cycloalkyl groups have 3, 4, 5, 6 or 7 members in a single ring. Examples of cycloalkyl groups include, for example, cyclohexyl, cyclopentyl, cyclobutyl, cyclopropyl, tetrahydronaphthyl and bicyclo[2.2.1]heptane. Examples of cycloalkanes include, for example, cyclohexane, methylcyclohexane, cyclohexanone, cyclohexanol, cyclopentane, cycloheptane, and cycloctane. The cycloalkyl groups herein are unsubstituted or, when specified as “optionally substituted”, may be substituted in one or more substitutable positions with various groups, as indicated.

[0165] The term “ring system” encompasses monocycles, as well as fused and/or bridged polycycles.

[0166] The terms “halogen” or “halo” indicate fluorine, chlorine, bromine, and iodine. In certain embodiments of each and every embodiment described herein, the term “halogen” or “halo” refers to fluorine or chlorine. In certain embodiments of each and every embodiment described herein, the term “halogen” or “halo” refers to fluorine.

[0167] The term “halide” indicates fluoride, chloride, bromide, and iodide. In certain embodiments of each and every embodiment described herein, the term “halide” refers to bromide or chloride.

[0168] The term “substituted,” when used to modify a specified group or radical, means that one or more hydrogen atoms of the specified group or radical are each, independently of one another, replaced with the same or different substituent groups as defined below, unless specified otherwise.

[0169] Optionally, the BIAs produced herein may be converted chemically or enzymatically into BIA derivatives. For example, nororipavine and glycosylated noripavine are suitable raw materials for chemical synthesis of many useful compounds such as NaI-BIAs. Chemical production of BIA-intermediates and BIAs is taught in, for example, WO 2018/211331 and WO 2021/144362. Various NaI-opioids synthesized from nororipavine have previously been taught in A. Sipos, S. Berenyi and S. Antus. Helvetica Chimica Acta Vol. 92 (2009) pp 1359-1365.

### Genetically Modified Host Cells

[0170] Recombinant microorganisms optimized to produce benzylisoquinoline alkaloids (BIA, BIA-glycoside, oripavine, thebaine, northebaine, nororipavine or glycosylated nororipavine or glucosylated nororipavine) are in great need and even more so host cells optimized to demethylate benzylisoquinoline alkaloids such as thebaine and/or oripavine into the corresponding northebaine and/or nororipavine, which are in high demand for chemical conversion into other pharmaceutically relevant benzylisoquinoline alkaloids (BIAs).

[0171] The invention provides in a first aspect such a genetically modified (recombinant) microbial host cell capable of producing one or more BIA (benzylisoquinoline alkaloids including but not limited to any BIA, BIA-glycoside, oripavine, glucosylated oripavine, gly-oripavine, thebaine, northebaine, nororipavine, gly-nororipavine, glucosylated nororipavine, nor-opioids or glycosylated noropioids) comprising a pathway having enhanced production of one or more benzylisoquinoline alkaloids wherein the cell comprises:
[0172] (1) one or more heterologous CYP demethylases capable of converting thebaine into northebaine, thebaine into oripavine, northebaine into nororipavine and/or oripavine into nororipavine, and one or more demethylase cytochrome P450 reductase (demethylase-CPR), and/or
[0173] (2) heterologous sequences encoding:
   [0174] (a) a tyrosine hydroxylase (TH) converting L-tyrosine into L-dopa, and
   [0175] (b) optionally, a TH-CPR capable of reducing the TH of i), and
   [0176] (c) a L-dopa decarboxylase (DODC) converting L-dopa into dopamine, or a tyrosine decarboxylase (TYDC) converting L-dopa into dopamine, and
   [0177] (d) a hydroxyphenylpyruvate decarboxylase (HPPDC) converting 4-HPP into 4-HPAA, and
   [0178] (e) a monoamine oxidase converting dopamine into 3,4-DHPAA, or a N-methyl-coclaurine hydroxylase (NMCH) converting (S)-Coclaurine into (S)-3′-hydroxycoclaurine and/or (S)—N-Methylcoclaurine into (S)-3′-Hydroxy-N-Methylcoclaurine; and
   [0179] (f) a norcoclaurine synthase (NCS) converting Dopamine and 4-HPAA into (S)-norcoclaurine and/or 3,4-DHPAA and dopamine to NLDS, and
   [0180] (g) a 6-O-methyltransferase (6-OMT) converting (S)-norcoclaurine into (S)-Coclaurine and/or norlaudanosoline into (S)-3′-Hydroxy-coclaurine, and
   [0181] (h) a coclaurine-N-methyltransferase (CNMT) converting (S)-Coclaurine into (S)—N-Methylcoclaurine and/or (S)-3′-hydroxycoclaurine into (S)-3′-hydroxy-N-methyl-coclaurine, and
   [0182] (i) a N-methyl-coclaurine hydroxylase (NMCH) converting (S)-Coclaurine into (S)-3′-hydroxycoclaurine and/or (S)—N-Methylcoclaurine into (S)-3′-Hydroxy-N-Methylcoclaurine, and
   [0183] (j) a 3′-hydroxy-N-methyl-(S)-coclaurine 4′-O-methyltransferase (4′-OMT) converting (S)-3′-Hydroxy-N-Methylcoclaurine into (S)-reticuline, and
   [0184] (k) a 1,2-dehydroreticuline synthase-1,2-dehydroreticuline reductase (DRS-DRR) converting (S)-reticuline into (R)-reticuline comprised of one or more proteins, and
   [0185] (l) a salutaridine synthase (SAS) converting (R)-reticuline into Salutaridine, and
   [0186] (m) a salutaridine reductase (SAR) converting Salutaridine to Salutaridinol, and
   [0187] (n) a salutaridinol 7-O-acetyltransferase (SAT) converting Salutaridinol into 7-O-acetylsalutaridinol, and
   [0188] (o) a thebaine synthase (THS) converting 7-O-acetylsalutaridinol or 7-O-acetylsalutaridinol acetate into thebaine;
   [0189] (p) a demethylase converting thebaine into oripavine, thebaine into northebaine, oripavine into nororipavine and/or northebaine into nororipavine; and/or
   [0190] (q) a demethylase-CPR capable of reducing the demethylase of xvi).
[0191] (3) and optionally, one or more glycosyl transferases capable of transferring a glycosyl moiety to oripavine or nororipavine.

[0192] In some aspects, the pathway from tyrosine to thebaine (and thence to downstream BIAs) in the recombinant microbial host cell comprising a BIA-efflux transporter comprises the enzyme activities: TYRH, DODC, NCS, 6OMT, CNMT, NMCH, 4OMT, DRS-DRR, SAS, SAR, SAT, THS and if the BIA is downstream of thebaine, optionally a demethylase converting thebaine into oripavine, thebaine into northebaine, oripavine into nororipavine and/or northebaine into nororipavine, and optionally a demethylase-CPR capable of reducing the demethylase, optionally, one or more glycosyl transferases capable of transferring a glycosyl moiety to oripavine or nororipavine. In other aspects, the pathway from tyrosine to thebaine (and thence to downstream BIAs) in the recombinant microbial host cell comprising a BIA-efflux transporter comprises the enzyme activities: TYRH, DODC, MAO, NCS, 6OMT, CNMT, 4 OMT, DRS-DRR, sal synthase, sal reductase, sat1, thebaine synthase.

[0193] In some aspects, the pathway from tyrosine to thebaine (and thence to downstream BIAs) in the recombinant microbial host cell comprising a BIA-efflux transporter comprises one or more selected from:
[0194] a) expression of one or more heterologous genes encoding a demethylase capable of converting thebaine into northebaine, thebaine into oripavine, northebaine into nororipavine and/or oripavine into nororipavine;
[0195] b) expression of one or more heterologous genes encoding a tyrosine hydroxylases (TH) converting L-tyrosine into L-dopa selected from TH's having at least 20%, such as at least 40%, such as at least 50%, such as at least 60%, such as at least 70%, such as at least 80%, such as at least 90%, such as at least 95%, such as at least 96%, such as at least 97%, such as at least 98%, such as at least 99%, such as 100% identity to the TH comprised in 7, 9, 11, 13, 15, 17, 19, 21, 23, 25, 27, 29, 31, 33, 35, 37, 39, 41, 43, 45, 47, 49, 51, 53, 55, 57, 59, 61, 63 or 65;
[0196] c) reduction or elimination of activity of one or more dehydrogenases native to the host cell selected from the dehydrogenases comprised in SEQ ID NO: 663, 665, 667, 669, 671, 673, 675, 677, 679, 681, 683, 685, 687, 689, 691, 693, 695, 697, 699, 701, 703 or 705;
[0197] d) reduction or elimination of activity of one or more reductases native to the host cell selected from the reductases comprised in SEQ ID NO: 707, 709, 711, 713, 715, 717, 719, 721, 723, 725, 727, 729 or 731;
[0198] e) expression of one or more heterologous genes encoding a norcoclaurine synthases (NCS) converting Dopamine and 4-HPAA into (S)-norcoclaurine selected from NCS's having at least 20%, such as at least 40%, such as at least 50%, such as at least 60%, such as at least 70%, such as at least 80%, such as at least 90%, such as at least 95%, such as at least 96%, such as at least 97%, such as at least 98%, such as at least 99%, such as 100% identity to the NCS comprised in SEQ ID NO: 73 OR 76;
[0199] f) expression of one or more heterologous genes encoding
   [0200] i) a fused 1,2-dehydroreticuline synthase-1,2-dehydroreticuline reductases (DRS-DRR) converting (S)-Reticuline into (R)-reticuline, wherein
      [0201] ia) the DRS-DDRs has at least 20%, such as at least 40%, such as at least 50%, such as at least 60%, such as at least 70%, such as at least 80%, such as at least 90%, such as at least 95%, such as at least 96%, such as at least 97%, such as at least 98%, such as at least 99%, such as 100% identity to the DRS-DRR comprised in SEQ ID NO: 92, 94, 96; or
      [0202] ib) the DRS moiety has at least 20%, such as at least 40%, such as at least 50%, such as at least 60%, such as at least 70%, such as at least 80%, such as at least 90%, such as at least 95%, such as at least 96%, such as at least 97%, such as at least 98%, such as at least 99%, such as 100% identity to the DRS comprised in SEQ ID NO: 98, 100, 102, 104 or 106; and the DRR moiety has at least 20%, such as at least 40%, such as at least 50%, such as at least 60%, such as at least 70%, such as at least 80%, such as at least 90%, such as at least 95%, such as at least 96%, such as at least 97%, such as at least 98%, such as at least 99%, such as 100% identity to the DRR comprised in SEQ ID NO: 108 or 110; or
   [0203] ii) a DRS having at least 20%, such as at least 40%, such as at least 50%, such as at least 60%, such as at least 70%, such as at least 80%, such as at least 90%, such as at least 95%, such as at least 96%, such as at least 97%, such as at least 98%, such as at least 99%, such as 100% identity to the DRS comprised in SEQ ID NO: 98, 100, 102, 104 or 106; and a DRR having at least 20%, such as at least 40%, such as at least 50%, such as at least 60%, such as at least 70%, such as at least 80%, such as at least 90%, such as at least 95%, such as at least 96%, such as at least 97%, such as at least 98%, such as at least 99%, such as 100% identity to the DRR comprised in SEQ ID NO: 108 or 110;
[0204] g) expression of one or more heterologous genes encoding a thebaine synthase (THS) converting 7-O-acetylsalutaridinol into thebaine selected from THS's having at least 20%, such as at least 40%, such as at least 50%, such as at least 60%, such as at least 70%, such as at least 80%, such as at least 90%, such as at least 95%, such as at least 96%, such as at least 97%, such as at least 98%, such as at least 99%, such as 100% identity to the THS comprised in SEQ ID NO: 126, 127, 128, 129, 131, 133, 134, 136, 138;
[0205] h) expression of one or more heterologous genes encoding a transporter protein capable of increasing uptake in the host cell of a reticuline derivative selected from transporter proteins having at least 20%, such as at least 40%, such as at least 50%, such as at least 60%, such as at least 70%, such as at least 80%, such as at least 90%, such as at least 95%, such as at least 96%, such as at least 97%, such as at least 98%, such as at least 99%, such as 100% identity to the transporter protein comprised in SEQ ID NO: 307, 309, 311, 313, 315, 317, 319, 321, 323, 325, 327, 329, 331, 333, 335, 337, 339, 341, 343, 345, 347, 349, 351, 353, 355, 357, 359, 361, 363, 365, 367, 369, 371, 373, 375, 377, 379, 381, 383, 385, 387, 389, 391, 393, 395, 397, 399, 401, 403, 405, 407, 409, 411, 413, 415, 417, 419, 421, 423, 425, 427, 429, 431, 433, 435, 437, 439, 441, 443, 445, 447, 449, 451, 453, 455, 457, 459, 461, 463, 465, 467, 469, 471, 473, 475, 477, 479, 481, 483, 485, 487, 489, 491, 493, 495, 497, 499, 501, 503, 505, 507, 509, 511, 513, 515, 517, 519, 521, 523, 525, 527, 529, 531, 533, 535, 537, 539, 541, 543, 545, 547, 549, 551, 553, 555, 557, 559, 561, 563, 565, 567, 569, 571, 573, 575, 577, 579, 581, 583, 585, 587, 589, 591, 593, 595, 597, 599, 601, 603, 605, 607, 609, 611, 613, 615, 617, 619, 621, 623, 625, 627, 629, 631, 633, 635, 637, 639, 641, 643, 645, 647, 649, 651, 653, 655, 657, 659, 661, 733, 735, 774, 776, 778, 780, 782, 784, 786, 788, 790, 792, 794, 795, 797, 799, 801, 803, 805, 807, 809, 811, 813, 815, 817, 819, 821, 823 or 825, and
[0206] i) a recombinant polynucleotide comprising a promoter operably linked to an ABC transporter, wherein the ABC transporter is a member of the ABCG/pleiotropic drug resistance (PDR) subfamily of ABC transporters or the ABCC/multi-drug resistance associated protein (MRP) subfamily of ABC transporters, and wherein the ABC transporter is capable of effluxing from the host cell one or more opioids selected from a BIA, BIA-glycoside, oripavine, thebaine, northebaine, nororipavine or gly-nororipavine or glucosylated nororipavine.

### Heterologous Demethylase

[0207] In one aspect, the genetically modified host cells of the invention expresses, alone or in combination with other heterologous genes of the invention, one or more heterologous genes encoding one or more demethylases capable of converting thebaine into northebaine, thebaine into oripavine, northebaine into nororipavine and/or oripavine into nororipavine. The demethylase of the invention can be any suitable demethylase capable of converting thebaine into northebaine, thebaine into oripavine, northebaine into nororipavine and/or oripavine into nororipavine, which is heterologous to the host cell and which cooperates well with the other enzymes of the benzylisoquinoline alkaloid pathway and/or the auxiliary cellular mechanisms.

[0208] In a particular embodiment the demethylase have specificity towards producing the nor-compounds and produces less by-products. It has been identified that in particular insect demethylase, when expressed in a genetically modified host cell possess a hitherto unprecedented high product specificity producing a high product: by-product ratio, where the product: by-product is either (northebaine):(thebaine N-oxide), (northebaine):(northebaine oxaziridine), (nororipavine):(oripavine N-oxide) and/or (nororipavine):(nororipavine oxaziridine). Aside from more effectively converting more thebaine and/or oripavine into the desired corresponding nor-compounds, for in vivo conversion the insect demethylase of the invention also produces less N-oxide or oxaziridine by-products and this property provide advantage over the art, since such by-products may impact negatively of the cell function as well as they may interfere with efficiency of any subsequent chemical conversion steps and lower the efficiency of production. Accordingly, in one embodiment the demethylase of the invention have a product: by-product molar ratio of at least 2.0, such as at least 2.25, such as at least 2.5, such as at least 2.75, such as at least 3.0, such as at least 3.25, such as at least 3.5, such as at least 3.75, such as at least 4.0, such as at least 4.5, such as at least 5.0, such as at least 10.0, such as at least 25, such as at least 50, such as at least 75, such as at least 100 and wherein when the product is northebaine then the by-product is thebaine N-oxide and/or northebaine oxaziridine and when the product is nororipavine then the by-product is oripavine N-oxide and/or nororipavine oxaziridine.

[0209] For example, one insect demethylase of the invention remarkably displays N-demethylation activity and/or O-activity, whereby it is capable of converting thebaine of the formula I into northebaine of the formula II:

[chemical structure]

[0210] converting thebaine of the formula I into oripavine of the formula (III)

[chemical structure]

[0211] and/or converting oripavine of the formula (III) into nororipavine of formula IV:

[chemical structure]

[0212] Further, the present inventors have found that demethylases derived from insects and in particular demethylases of family CYP6, are remarkably effective in converting thebaine and/or oripavine into the corresponding nor-compounds producing less by-products. Therefore, in one embodiment the demethylase of the invention is derived from an insect and in another embodiment the demethylase of the invention is of family CYP6. Relevant insects include those which feeds on plants with high contents of thebaine and/or oripavine such as poppy and include moths of the order Lepidoptera, such as moths of the genus Helicoverpa, Spodoptera, Cnaphalocrocis, Bombyx and Heliothis. Demethylases from the species Helicoverpa armigera, Spodoptera exigua, Cnaphalocrocis medinalis, Bombyx mandarina and Heliothis virescens, are particularly useful. Without being bound to the theory the present inventors contemplate that insects feeding from plants containing a high level of thebaine and/or oripavine, as a protection mechanism, during evolution have developed enzymes converting these potentially harmful substrates.

[0213] Examples of insect demethylases which works remarkably well in converting thebaine and/or oripavine with low formation of by-products in a heterologous host cell includes the demethylases selected from of SEQ ID NO: 140, 142, 144, 146, 148, 150, 152, 154, 156, 158, 160, 162, 164, 166, 168, 170, 172, 174, 176, 178, 180, 182, 184, 186, 188, 190, 192, 194, 196, 827, 829, 831, 833, 835, 837, 839, 841, 843, 845, 847, 849, 851, 853, 855, 857, 859, 861, 863, 865, 867 and 869.

[0214] Accordingly, in a further embodiment the demethylase of the invention comprises a polypeptide selected from the group consisting of:
[0215] a) a demethylase which is at least 20%, such as at least 40%, such as at least 50%, such as at least 60%, such as at least 70%, such as at least 80%, such as at least 90%, such as at least 95%, such as at least 96%, such as at least 97%, such as at least 98%, such as at least 99%, such as 100% identical to the demethylase comprised in any one of SEQ ID NO: 140, 142, 144, 146, 148, 150, 152, 154, 156, 158, 160, 162, 164, 166, 168, 170, 172, 174, 176, 178, 180, 182, 184, 186, 188, 190, 192, 194, 196, 827, 829, 831, 833, 835, 837, 839, 841, 843, 845, 847, 849, 851, 853, 855, 857, 859, 861, 863, 865, 867, 876 and 869;
[0216] b) a demethylase encoded by a polynucleotide which is at least 20%, such as at least 40%, such as at least 50%, such as at least 60%, such as at least 70%, such as at least 80%, such as at least 90%, such as at least 95%, such as at least 96%, such as at least 97%, such as at least 98%, such as at least 99%, such as 100% identical to a polynucleotide comprised in any one of SEQ ID NO: 141, 143, 145, 147, 149, 151, 153, 155, 157, 159, 161, 163, 165, 167, 169, 171, 173, 175, 177, 179, 181, 183, 185, 187, 189, 191, 193, 195, 197, 828, 830, 832, 834, 836, 838, 840, 842, 844, 846, 848, 850, 852, 854, 856, 858, 860, 862, 864, 866, 868, 875 and 870 or genomic DNA thereof; and
[0217] c) a functional variant of the demethylase of (a) or (b) capable of converting thebaine into northebaine, thebaine into oripavine, northebaine into nororipavine and/or oripavine into nororipavine.

[0218] In particular the insect demethylase is:
[0219] a) a demethylase comprised in any one of SEQ ID NO: 140, 142, 144, 146, 148, 150, 152, 154, 156, 158, 160, 162, 164, 166, 168, 170, 172, 174, 176, 178, 180, 182, 184, 186, 188, 190, 192, 194, 196, 827, 829, 831, 833, 835, 837, 839, 841, 843, 845, 847, 849, 851, 853, 855, 857, 859, 861, 863, 865, 867, 876 and 869; or
[0220] b) a demethylase encoded by a polynucleotide comprised in any one of SEQ ID NO: or genomic DNA thereof encoding the P450 comprised in any one of SEQ ID NO: 141, 143, 145, 147, 149, 151, 153, 155, 157, 159, 161, 163, 165, 167, 169, 171, 173, 175, 177, 179, 181, 183, 185, 187, 189, 191, 193, 195, 197, 828, 830, 832, 834, 836, 838, 840, 842, 844, 846, 848, 850, 852, 854, 856, 858, 860, 862, 864, 866, 868, 875 and 870.

[0221] Alternatively, the demethylase of the invention can be derived from a fungus, in particular fungi of a genus selected from Rhizopus, Lichtheimia, Syncephalastrum, Cunninghamella, Mucor, Parasitella, Absidia, Choanephora, Bifiguratus and Choanephora. In a more specific embodiment the P450 may be derived from a fungal species selected from Rhizopus microspores, Rhizopus azygosporus, Rhizopus stolonifera, Rhizopus oryzae, Rhizopus delemar, Lichtheimia corymbifera, Lichtheimia ramosa, Syncephalastrum racemosum, Cunninghamella echinulate, Mucor circinelloides, Mucor ambiguous, Parasitella parasitica, Absidia repens, Absidia glauca, Choanephora cucurbitarum, Bifiguratus adelaidae and Choanephora cucurbitarum.

[0222] Examples of fungal demethylases which works well in converting thebaine and/or oripavine with low formation of by-products in a heterologous host cell includes the demethylase selected from SEQ ID NO: 198, 200, 202, 204, 206, 208, 210, 212, 214, 216, 218, 220, 222, 224, 226, 228, 230, 232, 234, 236, 238, 240, 242, 244, 246, 248, 250, 252, 254, 256, 258, 260, 262, 264, 266, 268, 270, 272, 274, 276, 278, 280, 282, 284, 286, 288 or 290. Accordingly, in a further embodiment the demethylase of the invention comprises:
[0223] a) a polypeptide having at least 20%, such as at least 40%, such as at least 50%, such as at least 60%, such as at least 70%, such as at least 80%, such as at least 90%, such as at least 95%, such as at least 96%, such as at least 97%, such as at least 98%, such as at least 99%, such as 100% identical to the demethylase comprised in any one of SEQ ID NO: 198, 200, 202, 204, 206, 208, 210, 212, 214, 216, 218, 220, 222, 224, 226, 228, 230, 232, 234, 236, 238, 240, 242, 244, 246, 248, 250, 252, 254, 256, 258, 260, 262, 264, 266, 268, 270, 272, 274, 276, 278, 280, 282, 284, 286, 288 or 290; or
[0224] b) a polypeptide encoded by a polynucleotide which is at least 20%, such as at least 40%, such as at least 50%, such as at least 60%, such as at least 70%, such as at least 80%, such as at least 90%, such as at least 95%, such as at least 96%, such as at least 97%, such as at least 98%, such as at least 99%, such as 100% identical to the polynucleotide comprised in any one of SEQ ID NO: 199, 201, 203, 205, 207, 209, 211, 213, 215, 217, 219, 221, 223, 225, 227, 229, 231, 233, 235, 237, 239, 241, 243, 245, 247, 249, 251, 253, 255, 257, 259, 261, 263, 265, 267, 269, 271, 273, 275, 277, 279, 281, 283, 285, 287, 289, 291 or genomic DNA thereof; or
[0225] c) a functional variant of the demethylase of (a) or (b) capable of converting thebaine into northebaine, thebaine into oripavine, northebaine into nororipavine and/or oripavine into nororipavine.

[0226] In particular the fungal demethylase is:
[0227] a) the demethylase comprised in any one of SEQ ID NO: 198, 200, 202, 204, 206, 208, 210, 212, 214, 216, 218, 220, 222, 224, 226, 228, 230, 232, 234, 236, 238, 240, 242, 244, 246, 248, 250, 252, 254, 256, 258, 260, 262, 264, 266, 268, 270, 272, 274, 276, 278, 280, 282, 284, 286, 288 and 290; or
[0228] b) the demethylase encoded by a polynucleotide comprised in any one of SEQ ID NO: 199, 201, 203, 205, 207, 209, 211, 213, 215, 217, 219, 221, 223, 225, 227, 229, 231, 233, 235, 237, 239, 241, 243, 245, 247, 249, 251, 253, 255, 257, 259, 261, 263, 265, 267, 269, 271, 273, 275, 277, 279, 281, 283, 285, 287, 289 and 291 or genomic DNA thereof.

[0229] A particular demethylase of the invention is one which does not comprise one or more of the amino acids selected from:
[0230] a) Valine at a position corresponding to V75 of SEQ ID NO: 290;
[0231] b) Isoleucine at a position corresponding to I79 of SEQ ID NO: 290;
[0232] c) Isoleucine at a position corresponding to V83 of SEQ ID NO: 290;
[0233] d) Asparagine at a position corresponding to N84 of SEQ ID NO: 290;
[0234] e) Arginine at a position corresponding to R86 of SEQ ID NO: 290;
[0235] f) Aspartic acid at a position corresponding to D87 of SEQ ID NO: 290;
[0236] g) Glutamic acid at a position corresponding to E126 of SEQ ID NO: 290;
[0237] h) Threonine at a position corresponding to T145 of SEQ ID NO: 290;
[0238] i) Asparagine at a position corresponding to N172 of SEQ ID NO: 290;
[0239] j) Threonine at a position corresponding to T193 of SEQ ID NO: 290;
[0240] k) Glycine at a position corresponding to G218 of SEQ ID NO: 290;
[0241] l) Isoleucine at a position corresponding to 1236 of SEQ ID NO: 290;
[0242] m) Alanine at a position corresponding to A258 of SEQ ID NO: 290;
[0243] n) Methionine at a position corresponding to M259 of SEQ ID NO: 290;
[0244] o) Aspartic acid at a position corresponding to D298 of SEQ ID NO: 290;
[0245] p) Leucine at a position corresponding to L430 of SEQ ID NO: 290;
[0246] q) Histidine at a position corresponding to H448 of SEQ ID NO: 290;
[0247] r) Asparagine at a position corresponding to N503 of SEQ ID NO: 290;
[0248] s) Proline at a position corresponding to P506 of SEQ ID NO: 290;
[0249] t) Phenylalanine at a position corresponding to F507 of SEQ ID NO: 290;
[0250] u) Asparagine at a position corresponding to N508 of SEQ ID NO: 290; and
[0251] v) Valine at a position corresponding to V509 of SEQ ID NO: 290;

[0252] Further to this embodiment the demethylase may not comprise histidine at a position corresponding to H448 of SEQ ID NO: 290, asparagine at a position corresponding to H508 of SEQ ID NO: 290 and/or valine at a position corresponding to H509 of SEQ ID NO: 290. Still further to this embodiment the demethylase may comprise comprise tyrosine at the position corresponding to position 448 of SEQ ID NO: 290, threonine at the position corresponding to position corresponding to H508 of SEQ ID NO: 290 and/or glycine at the position corresponding to position corresponding to H509 of SEQ ID NO: 290. Within this embodiment the demethylase may specifically be the P450 of SEQ ID NO: 250 or SEQ ID NO: 252.

[0253] The demethylase of SEQ ID NO: 218, 220, 222, 224, 226, 228, 236, 240, 250, 252, 254 and 268 have in addition to N-demethylase activity also O-demethylase activity (ODM) and are capable of demethylating thebaine of the formula I into oripavine of the formula III as described supra.

[0254] In a separate embodiment the cell of the invention further comprises a demethylase-CPR capable of reducing and/or regenerating the demethylase enzyme. The demethylase-CPR may also be heterologous to the cell.

[0255] Some demethylases may work better together with a demethylase-CPR from a related source so in a particular embodiment where the demethylase is an insect demethylase, the demethylase-CPR may also advantageously be an insect demethylase-CPR, such as a demethylase-CPR derived from an insect of the order Lepidoptera, such as the insect demethylase-CPR derived from an insect of the genus helicoverpa, Heliothis or Spodoptera such as demethylase-CPR derived from an insect of the species Helicoverpa armigera, Heliothis virescens or Spodoptera exigua.

[0256] In particular, the insect demethylase-CPR may comprise a polypeptide selected from the group consisting of:
[0257] a) a demethylase-CPR which is at least 20%, such as at least 40%, such as at least 50%, such as at least 60%, such as at least 70%, such as at least 80%, such as at least 90%, such as at least 95%, such as at least 96%, such as at least 97%, such as at least 98%, such as at least 99%, such as 100% identical to the demethylase-CPR comprised in SEQ ID NO: 292, 294, 296, 298, 300 or 302;
[0258] b) a demethylase-CPR encoded by a polynucleotide which is at least 20% identical to the polynucleotide comprised in SEQ ID NO: 293, 295, 297, 299, 301, 303 or 305 or genomic DNA thereof; and
[0259] c) a functional variant of the demethylase-CPR of (a) or (b) capable of reducing/regenerating the demethylase of the invention.

[0260] In another embodiment where the demethylase is a fungal demethylase the demethylase-CPR may advantageously be a fungal demethylase-CPR. In particular, the fungal demethylase-CPR may comprise a polypeptide selected from the group consisting of:
[0261] a) a demethylase-CPR which is at least 20%, such as at least 40%, such as at least 50%, such as at least 60%, such as at least 70%, such as at least 80%, such as at least 90%, such as at least 95%, such as at least 96%, such as at least 97%, such as at least 98%, such as at least 99%, such as 100% identical to the demethylase-CPR comprised in SEQ ID NO: 305;
[0262] b) a demethylase-CPR encoded by a polynucleotide which is at least 20%, such as at least 40%, such as at least 50%, such as at least 60%, such as at least 70%, such as at least 80%, such as at least 90%, such as at least 95%, such as at least 96%, such as at least 97%, such as at least 98%, such as at least 99%, such as 100% identical to the polynucleotide comprised in SEQ ID NO: 306 or genomic DNA thereof; and
[0263] c) a functional variant of the demethylase-CPR of (a) or (b) capable of reducing/regenerating the demethylase.

[0264] Further suitable demethylases are disclosed in WO2018/229306 and WO2018/075670, which are hereby incorporated by reference in their entirety.

[0265] In one embodiment the heterologous demethylase is an artificial mutant. In one type of mutations the naturally occurring leader/signal sequence has been mutated to improve the performance eg. By wholly or partially replacing the the leader/signal sequence with a leader/signal sequence from another enzyme. Examples of such mutations are SEQ ID NOS: 845, 847, 851, 853, 857, 859, 863, 865, 867 and 869.

[0266] In another embodiment the demethylase is a polypeptide having at least 20%, such as at least 40%, such as at least 50%, such as at least 60%, such as at least 70%, such as at least 80%, such as at least 90%, such as at least 95%, such as at least 96%, such as at least 97%, such as at least 98%, such as at least 99%, such as 100% identical to the demethylase comprised in SEQ ID No. 152.

[0267] In another embodiment the demethylase is polypeptide having at least 20%, such as at least 40%, such as at least 50%, such as at least 60%, such as at least 70%, such as at least 80%, such as at least 90%, such as at least 95%, such as at least 96%, such as at least 97%, such as at least 98%, such as at least 99%, such as 100% identical to the demethylase comprised in SEQ ID No. 140.

[0268] Further the invention provides mutant insect demethylases comprising one or more mutations in the signal sequence of the naturally occurring insect demethylase. In these insect demethylases the signal sequence may have been wholly or partially replaced by a signal sequence from another enzyme. Suitably such a mutant demethylase is a polypeptide having having at least 70%, such as at least 80%, such as at least 90%, such as at least 95%, such as at least 96%, such as at least 97%, such as at least 98%, such as at least 99%, such as 100% identity to the demethylase comprised in SEQ ID NO: 845, 847, 851, 853, 857, 859, 863, 865, 867 or 869. Also mutant insect demethylases are provided having least 70%, such as at least 80%, such as at least 90%, such as at least 95%, such as at least 96%, such as at least 97%, such as at least 98%, such as at least 99%, such as 100% identity to the demethylase comprised in SEQ ID NO: 152. Still further, mutant insect demethylases are provided having at least 70%, such as at least 80%, such as at least 90%, such as at least 95%, such as at least 96%, such as at least 97%, such as at least 98%, such as at least 99%, such as 100% identity to the demethylase comprised in SEQ ID NO: 140.

[0269] Analysis comparing the best performing insect demethylases was shown share structural sequence features in the form of amino acid positions conserved within the active and high performing insect demethylases.

### Heterologous TH—Tyrosine Hydroxylase

[0270] In another aspect the host cell of the invention expresses alone or in combination with other heterologous genes of the invention one or more heterologous genes encoding a tyrosine hydroxylases. The TH of the invention may suitably be any natural or mutant TH capable of catalyzing L-tyrosine into L-DOPA. Particularly, the TH is of the CYP76 family. In a special embodiment the TH has at least 20%, such as at least 40%, such as at least 50%, such as at least 60%, such as at least 70%, such as at least 80%, such as at least 90%, such as at least 95%, such as at least 96%, such as at least 97%, such as at least 98%, such as at least 99%, such as 100% identity to the TH comprised in SEQ ID NO: 7, 9, 11, 13, 15, 17, 19, 21, 23, 25, 27, 29, 31, 33, 35, 37, 39, 41, 43, 45, 47, 49, 51, 53, 55, 57, 59, 61, 63 or 65. In a separate embodiment the TH has at least 90%, such as at least 95%, such as at least 96%, such as at least 97%, such as at least 98%, such as at least 99%, such as 100% identity to the TH comprised in SEQ ID NO: 7, 9, 11, 13, 15, 17, 19, 21, 23 or 25. Further suitable THs are disclosed in PCT/EP2020/050610 (unpublished) and WO2016/049364, which are hereby incorporated by reference in its entirety.

### Reducing or Eliminating Enzymes Lowering Performance of the Benzylisoquinoline Alkaloid Pathway

[0271] In another aspect the host cell of the invention is genetically modified to reduce or eliminate (knockout) activity of one or more native enzymes, which negatively impacts on the production of benzylisoquinoline alkaloid. Such manipulation may be achieved in several ways, all applicable to the host cell of the invention. Reduction or elimination of enzyme activity may be accomplished by disrupting, deleting and/or attenuating expression of the gene encoding the enzyme and/or the translation of the RNA into the protein, eg. by deleting or mutating the gene. Alternatively, and/or in addition, the the enzyme may also be mutated to a less active or non-active variant. In reducing or eliminating activity activity of enzymes native to the host care should be taken to balance the positive impact on production of benzylisoquinoline alkaloid and the potential negative impact on cellular viability and growth for maintain an acceptable level of vital cellular functions.

[0272] Reduction or elimination of activity of enzymes native to the host cell, particularly includes reduction or elimination enzymes shunting precursors or products away from the benzylisoquinoline alkaloid pathway, so that they become unavailable for producing benzylisoquinoline alkaloids. One such group of such enzymes is dehydrogenases native to the host cell and in particular dehydrogenases comprised in SEQ ID NO: 663, 665, 667, 669, 671, 673, 675, 677, 679, 681, 683, 685, 687, 689, 691, 693, 695, 697, 699, 701, 703 or 705. Another group of such enzymes are reductases native to the host cell and in particular reductases comprised in SEQ ID NO: 707, 709, 711, 713, 715, 717, 719, 721, 723, 725, 727, 729 or 731. Preferred targets of reduction or elimination are one or more enzymes comprised in SEQ ID NO: 665 (ADH6), 669 (YPR1), 671 (AAD3), 675 (ADH3), 679 (ALD6), 705 (HFD1), 709 (ALD4), 713 (GRE2), 717 (YDR541C), 721 (ARI1), 729 (PHA2) or 731 (TRP3). Reduction or elimination of one or more the enzymes comprised in 705 (HFD1), 713 (GRE2) or 721 (ARI1), is particularly useful.

[0273] Further useful knockouts are disclosed in WO2019/243624, WO2018/029282, WO2019/157383 and Pyne et al, BioRxiv preprint 2019; all hereby incorporated by reference in their entirety.

### Heterologous Norcoclaurine Synthase (NCS)

[0274] In a further aspect the host cell of the invention expresses alone or in combination with other heterologous genes of the invention one or more heterologous gene encoding a norcoclaurine synthase (NCS). The NCS of the invention may suitably be any natural or mutant NCS capable of converting Dopamine and 4-HPAA into (S)-norcoclaurine. In a special embodiment the NCS has at least 20%, such as at least 40%, such as at least 50%, such as at least 60%, such as at least 70%, such as at least 80%, such as at least 90%, such as at least 95%, such as at least 96%, such as at least 97%, such as at least 98%, such as at least 99%, such as 100% identity to the NCS comprised in SEQ ID NO: 73 OR 76. In a separate embodiment the NCS has at least 90%, such as at least 95%, such as at least 96%, such as at least 97%, such as at least 98%, such as at least 99%, such as 100% identity to the NCS comprised in SEQ ID NO: 73 OR 76. Further suitable NCSs are disclosed in WO2018/229305, WO2014/143744, WO2019/165551 and US2015267233, which is hereby incorporated by reference in its entirety.

### Heterologous STORR

[0275] In a further aspect the host cell of the invention expresses alone or in combination with other heterologous genes of the invention one or more heterologous genes encoding enzymes capable of epimerizing/isomerizing one benzylisoquinoline alkaloid to a benzylisoquinoline alkaloid isomer, such as for example(S)-Reticuline into (R)-reticuline. In a special embodiment the epimerase is:
[0276] i) a fused 1,2-dehydroreticuline synthase-1,2-dehydroreticuline reductases (DRS-DRR) converting (S)-Reticuline into (R)-reticuline, wherein:
   [0277] a) the DRS-DDRs has at least 20%, such as at least 40%, such as at least 50%, such as at least 60%, such as at least 70%, such as at least 80%, such as at least 90%, such as at least 95%, such as at least 96%, such as at least 97%, such as at least 98%, such as at least 99%, such as 100% identity to the DRS-DRR comprised in SEQ ID NO: 92, 94, 96; or
   [0278] b) the DRS moiety has at least 20%, such as at least 40%, such as at least 50%, such as at least 60%, such as at least 70%, such as at least 80%, such as at least 90%, such as at least 95%, such as at least 96%, such as at least 97%, such as at least 98%, such as at least 99%, such as 100% identity to the DRS comprised in SEQ ID NO: 98, 100, 102, 104 or 106; and the DRR moiety has at least 20%, such as at least 40%, such as at least 50%, such as at least 60%, such as at least 70%, such as at least 80%, such as at least 90%, such as at least 95%, such as at least 96%, such as at least 97%, such as at least 98%, such as at least 99%, such as 100% identity to the DRR comprised in SEQ ID NO: 108 or 110; or
[0279] ii) a DRS having at least 20%, such as at least 40%, such as at least 50%, such as at least 60%, such as at least 70%, such as at least 80%, such as at least 90%, such as at least 95%, such as at least 96%, such as at least 97%, such as at least 98%, such as at least 99%, such as 100% identity to the DRS comprised in SEQ ID NO: 98, 100, 102, 104 or 106; and a DRR having at least 20%, such as at least 40%, such as at least 50%, such as at least 60%, such as at least 70%, such as at least 80%, such as at least 90%, such as at least 95%, such as at least 96%, such as at least 97%, such as at least 98%, such as at least 99%, such as 100% identity to the DRR comprised in SEQ ID NO: 108 or 110.

[0280] In a particular embodiment the DRR moiety of the epimerase, whether fused to the DRS or separate an Imine reductase, preferably a StlRED such as the reductases comprised in SEQ ID NO. 108 or 110.

[0281] Further suitable epimerases/isomerases are disclosed in WO2015/081437, WO2016/183023, WO2015/173590, WO2018/000089, WO2019/028390 and WO2019/165551 which are hereby incorporated by reference in their entirety.

### Heterologous THS

[0282] In another aspect the host cell of the invention expresses alone or in combination with other heterologous genes of the invention one or more heterologous genes encoding a thebaine synthase (THS). The THS of the invention may suitably be any natural or mutant THS capable of converting 7-O-acetylsalutaridinol into thebaine. In a special embodiment the THS has is at least 20%, such as at least 40%, such as at least 50%, such as at least 60%, such as at least 70%, such as at least 80%, such as at least 90%, such as at least 95%, such as at least 96%, such as at least 97%, such as at least 98%, such as at least 99%, such as 100% identity to the THS comprised in SEQ ID NO: 126, 127, 128, 129, 131, 133, 134, 136 or 138. In particular SEQ ID NO: 134 and 136 are very efficient thebaine synthases.

[0283] Further suitable THSs are disclosed in WO2018/005553, WO2014/143744 and WO2019/165551, which are hereby incorporated by reference in their entirety.

### Heterologous Uptake Transporters

[0284] In another aspect the host cell of the invention expresses alone or in combination with other heterologous genes of the invention one or more heterologous genes encoding an uptake transporter protein. The heterologous uptake transporter protein may suitably be any natural or mutant transporter protein capable of net uptake (i.e. influx) of a BIA or BIA intermediate, such as a reticuline derivative, such as thebaine or oripavine. Preferably, the uptake transporter is selected based on increased specificity of a substrate fed into or intermediate in the BIA-producing biosynthetic pathway of the recombinant microbial host cell compared to the one or more BIA, BIA-glycoside, oripavine, glucosylated oripavine, gly-oripavine, thebaine, northebaine, nororipavine, gly-nororipavine, glucosylated nororipavine, nor-opioids or glycosylated noropioids produced by the recombinant microbial host cell. In some aspects, the heterologous uptake transporter may be a purine permease (PUP transporter).

[0285] In a special embodiment the uptake transporter protein has at least 20%, such as at least 40%, such as at least 50%, such as at least 60%, such as at least 70%, such as at least 80%, such as at least 90%, such as at least 95%, such as at least 96%, such as at least 97%, such as at least 98%, such as at least 99%, such as 100% identity to the transporter protein comprised in SEQ ID NO: 307, 309, 311, 313, 315, 317, 319, 321, 323, 325, 327, 329, 331, 333, 335, 337, 339, 341, 343, 345, 347, 349, 351, 353, 355, 357, 359, 361, 363, 365, 367, 369, 371, 373, 375, 377, 379, 381, 383, 385, 387, 389, 391, 393, 395, 397, 399, 401, 403, 405, 407, 409, 411, 413, 415, 417, 419, 421, 423, 425, 427, 429, 431, 433, 435, 437, 439, 441, 443, 445, 447, 449, 451, 453, 455, 457, 459, 461, 463, 465, 467, 469, 471, 473, 475, 477, 479, 481, 483, 485, 487, 489, 491, 493, 495, 497, 499, 501, 503, 505, 507, 509, 511, 513, 515, 517, 519, 521, 523, 525, 527, 529, 531, 533, 535, 537, 539, 541, 543, 545, 547, 549, 551, 553, 555, 557, 559, 561, 563, 565, 567, 569, 571, 573, 575, 577, 579, 581, 583, 585, 587, 589, 591, 593, 595, 597, 599, 601, 603, 605, 607, 609, 611, 613, 615, 617, 619, 621, 623, 625, 627, 629, 631, 633, 635, 637, 639, 641, 643, 645, 647, 649, 651, 653, 655, 657, 659, 661, 733, 735, 778, 780, 782, 784, 786, 788, 790, 792, 794, 795, 797, 799, 801, 803, 805, 807, 809, 811, 813, 815, 817, 819, 821, 823 or 825.

[0286] Selecting the optimal uptake transporter for a given bioconversion or recombinant pathway setup may depend on the substrate used for bioconversion. So, in a particular embodiment when incorporating a demethylase, especially an insect demethylase, converting oripavine into nororipavine, oripavine uptake transporters are preferred. In particular transporters T180_McoPUP3_46 (SEQ ID NO: 595), T193_AanPUP3_55 (SEQ ID NO: 613), T149_AcoPUP3_59 (SEQ ID NO: 537) and/or T165_AcoPUP3_13 (SEQ ID NO: 567) have shown particularly effective. In another embodiment when in incorporating a demethylase, especially an insect demethylase, converting thebaine into northebaine, thebaine uptake transporters are preferred. In particular transporters T193_AanPUP3_55 (SEQ ID NO: 613), T198_AcoT97_GA (SEQ ID NO: 623), T149_AcoPUP3_59 (SEQ ID NO: 537) and/or T122_PsoPUP3_17 (SEQ ID NO: 487) have shown particularly effective. Further suitable transporter proteins are disclosed in WO2020/078837, which is hereby incorporated by reference in its entirety.

[0287] In a further separate embodiment, the transporter may be an Equilibrative Nucleoside Transporter (ENT) as described in Boswell-Casteel and Hays, 2017. Equilibrative Nucleoside Transporters including those belonging to the SLC29A/ENT transporter (TC 2.A.57) family (https://www.uniprot.org) have been shown herein to be capable of demethylase-mediated bioconversion of methylated benzylisoquinoline alkaloids to the corresponding nor-benzylisoquinoline alkaloids—in particular oripavine to nororipavine—in a highly efficient manner. Such improvements in yield are particularly remarkable and represent a significant step forward towards a sustainable, secure, and scalable biosynthetic means of producing these compounds.

[0288] The Equilibrative Nucleoside Transporter may particularly be an insect Equilibrative Nucleoside Transporter, including the transporters having at least 20%, such as at least 40%, such as at least 50%, such as at least 60%, such as at least 70%, such as at least 80%, such as at least 90%, such as at least 95%, such as at least 96%, such as at least 97%, such as at least 98%, such as at least 99%, such as 100% identity to the transporter protein comprised in SEQ ID NOS: 795, 797, 799, 801, 803, 805, 807, 809, 811, 813, 815, 817, 819, 821, 823 or 825, especially SEQ ID NOS: 795, 797, 799, 801.

[0289] The useful insect transporters disclosed herein have not hitherto been demonstrated to benefit production of benzylisoquinoline alkaloids when incorporated heterologously in genetically modified microorganisms comprising pathways producing benzylisoquinoline alkaloids. Accordingly, in a separate aspect the invention provides a genetically modified host cell comprising a pathway having enhanced production of one or more benzylisoquinoline alkaloids wherein the cell expresses one or more heterologous genes encoding an insect derived transporter protein increasing the cellular uptake or secretion of a benzylisoquinoline alkaloid precursor, said precursor preferably being a benzylisoquinoline alkaloid itself. Particular insect transporters include transporter proteins from the insect genera of Helicoverpa, Heliothis or Pectinophora, in particular from species of Pectinophora gossypiella, Helicoverpa armigera or Heliothis virescens. In particular the transporter proteins have at least 20%, such as at least 40%, such as at least 50%, such as at least 60%, such as at least 70%, such as at least 80%, such as at least 90%, such as at least 95%, such as at least 96%, such as at least 97%, such as at least 98%, such as at least 99%, such as 100% identity to the transporter protein comprised in SEQ ID NO: 631, 633, 637, 649, 651, 653, 655, 657 or 659. Moreover, the genetically modified cell of the invention may comprise one or more copies of genes encoding one or more insect transporter proteins such as genes/polynucleotides which is at least 70% identical to the transporter encoding polynucleotide comprised in SEQ ID NO: 632, 634, 638, 652, 654, 656, 658 or 660 or genomic DNA thereof.

### Further Enzymes of the Benzylisoquinoline Alkaloid Pathway

[0290] In another aspect the host cell of the invention expresses in combination with other heterologous genes of the invention one or more further heterologous or native enzymes of the benzylisoquinoline alkaloid pathway. In a particular embodiment the host cell of the invention expresses one or more genes encoding polypeptides selected from:
[0291] a) a 3-deoxy-D-arabino-2-heptulosonic acid 7-phosphate synthase (DAHP synthase) converting PEP and E4P into DAHP;
[0292] b) a 5-enolpyruvylshikimate-3-phosphate (EPSP) synthase (aro1) converting 3-phosphoshikimate and PEP into EPSP;
[0293] c) an aro1 polypeptide converting DHAP and PEP into EPSP;
[0294] d) a chorismate synthase converting EPSP into Chorismate;
[0295] e) a chorismate mutase converting Chorismate into prephenate;
[0296] f) a prephenate dehydrogenase (Tyr1) converting prephenate into 4-HPP;
[0297] g) an aromatic aminotransferase converting 4-HPP into L-Tyrosine;
[0298] h) a TH-CPR capable of reducing TH;
[0299] i) a L-dopa decarboxylase (DODC) converting L-dopa into dopamine;
[0300] j) a Tyrosine decarboxylase (TYDC) converting L-dopa into dopamine;
[0301] k) a hydroxyphenylpyruvate decarboxylase (HPPDC) converting 4-HPP into 4-HPAA;
[0302] l) a monoamine oxidase converting dopamine into 3,4-DHPAA;
[0303] m) a 6-O-methyltransferase (6-OMT) converting (S)-norcoclaurine into (S)-Coclaurine and/or norlaudanosoline into (S)-3′-Hydroxy-coclaurine;
[0304] n) a Coclaurine-N-methyltransferase (CNMT) converting (S)-Coclaurine into (S)—N-Methylcoclaurine and/or (S)-3′-hydroxycoclaurine into (S)-3′-hydroxy-N-methyl-coclaurine;
[0305] o) a N-methylcoclaurine hydroxylase (NMCH) converting (S)-Coclaurine into (S)-3′-hydroxycoclaurine and/or (S)—N-Methylcoclaurine into (S)-3′-Hydroxy-N-Methylcoclaurine;
[0306] p) a 3′-hydroxy-N-methyl-(S)-coclaurine 4′-O-methyltransferase (4′-OMT) converting (S)-3′-Hydroxy-N-Methylcoclaurine into (S)-Reticuline;
[0307] q) a DRS-CPR capable of reducing DRS-DRR;
[0308] r) a salutaridine synthase (SAS) converting (R)-reticuline into Salutaridine;
[0309] s) a salutaridine reductase (SAR) converting Salutaridine to Salutaridinol; and
[0310] t) a salutaridinol 7-O-acetyltransferase (SAT) converting Salutaridinol into 7-O-acetylsalutaridinol.

[0311] In a special embodiment the corresponding:
[0312] a) DAHP synthase has at least 20%, such as at least 40%, such as at least 50%, such as at least 60%, such as at least 70%, such as at least 80%, such as at least 90%, such as at least 95%, such as at least 96%, such as at least 97%, such as at least 98%, such as at least 99%, such as 100% identity to the DAHP synthase comprised in SEQ ID NO: 1
[0313] b) chorismate mutase has at least 20%, such as at least 40%, such as at least 50%, such as at least 60%, such as at least 70%, such as at least 80%, such as at least 90%, such as at least 95%, such as at least 96%, such as at least 97%, such as at least 98%, such as at least 99%, such as 100% identity to the chorismate synthase comprised in SEQ ID NO: 3;
[0314] c) TH-CPR has at least 20%, such as at least 40%, such as at least 50%, such as at least 60%, such as at least 70%, such as at least 80%, such as at least 90%, such as at least 95%, such as at least 96%, such as at least 97%, such as at least 98%, such as at least 99%, such as 100% identity to the TH-CPR comprised in SEQ ID NO: 67;
[0315] d) DODC has at least 20%, such as at least 40%, such as at least 50%, such as at least 60%, such as at least 70%, such as at least 80%, such as at least 90%, such as at least 95%, such as at least 96%, such as at least 97%, such as at least 98%, such as at least 99%, such as 100% identity to the DODC comprised in SEQ ID NO: 69 or 71;
[0316] e) 6-OMT has at least 20%, such as at least 40%, such as at least 50%, such as at least 60%, such as at least 70%, such as at least 80%, such as at least 90%, such as at least 95%, such as at least 96%, such as at least 97%, such as at least 98%, such as at least 99%, such as 100% identity to the 6-OMT comprised in SEQ ID NO: 79 or 81;
[0317] f) CNMT has at least 20%, such as at least 40%, such as at least 50%, such as at least 60%, such as at least 70%, such as at least 80%, such as at least 90%, such as at least 95%, such as at least 96%, such as at least 97%, such as at least 98%, such as at least 99%, such as 100% identity to the CNMT comprised in SEQ ID NO: 82 or 84;
[0318] g) NMCH has at least 20%, such as at least 40%, such as at least 50%, such as at least 60%, such as at least 70%, such as at least 80%, such as at least 90%, such as at least 95%, such as at least 96%, such as at least 97%, such as at least 98%, such as at least 99%, such as 100% identity to the NMCH comprised in EQ ID NO: 85 OR 87;
[0319] h) 4′-OMT has at least 20%, such as at least 40%, such as at least 50%, such as at least 60%, such as at least 70%, such as at least 80%, such as at least 90%, such as at least 95%, such as at least 96%, such as at least 97%, such as at least 98%, such as at least 99%, such as 100% identity to the 4′-OMT comprised in SEQ ID NO: 89 or 91;
[0320] i) DRS-CPR has at least 20%, such as at least 40%, such as at least 50%, such as at least 60%, such as at least 70%, such as at least 80%, such as at least 90%, such as at least 95%, such as at least 96%, such as at least 97%, such as at least 98%, such as at least 99%, such as 100% identity to the DRS-CPR comprised in SEQ ID NO: 112 or 114;
[0321] j) SAS has at least 20%, such as at least 40%, such as at least 50%, such as at least 60%, such as at least 70%, such as at least 80%, such as at least 90%, such as at least 95%, such as at least 96%, such as at least 97%, such as at least 98%, such as at least 99%, such as 100% identity to the SAS comprised in SEQ ID NO: 116 or 118;
[0322] k) SAR has at least 20%, such as at least 40%, such as at least 50%, such as at least 60%, such as at least 70%, such as at least 80%, such as at least 90%, such as at least 95%, such as at least 96%, such as at least 97%, such as at least 98%, such as at least 99%, such as 100% identity to the SAR comprised in SEQ ID NO: 120 or 122;
[0323] l) SAT has at least 20%, such as at least 40%, such as at least 50%, such as at least 60%, such as at least 70%, such as at least 80%, such as at least 90%, such as at least 95%, such as at least 96%, such as at least 97%, such as at least 98%, such as at least 99%, such as 100% identity to the SAT comprised in SEQ ID NO: 123 or 125; and

[0324] Further suitable enzymes of the benzylisoquinoline alkaloid pathway are disclosed in US2019100781 and WO2019/165551, which is hereby incorporated by reference in their entirety.

### Additional Cell Modifications Improving Production of Benzylisoquinoline Alkaloids

[0325] During the efforts of improving cellular production of recombinant cellular production of benzylisoquinoline alkaloids, several additional useful modifications to cells improving the cellular performance was discovered. In a first aspect it was found that cytosolic heme levels in a production host cell is a significant limiting factor in production of demethylated nor-benzylisoquinoline alkaloids such as nororipavine and/or northebaine and that modifications to the cell increasing the cytosolic heme levels strongly benefits production of such demethylated nor-benzylisoquinoline alkaloids. Accordingly, in one embodiment the host cell is further modified to increase availability of heme in the cell, in particular by modifying expression of one or more heme expression co-factors in the cell.

[0326] In one embodiment the heme availability can be increased by overexpressing and/or co-expressing one or more rate-limiting enzymes from the heme pathway, including but not limited to HEM2, HEM3 and/or HEM12. Overexpression of such genes can be accomplished for example by increasing the number of copies of integrated genes and/or by using stronger promoters of other factors increase translation or transcription of the gene. Preferably both an increase in copy number and use of an appropriate combination of stronger and weaker promoters are used to increase availability of heme. Useful promoters for these gene include pPYK1, pSED1, pKEX2, pTEF1, pTDH3 and pPGK1, where pTEF1, pTDH3 and pPGK1 are the stronger ones. In another embodiment heme availability is increased by disrupting, deleting and/or attenuating any heme-down regulating genes, such as HMX1. In another embodiment heme availability is increased by adding a heme production booster agent such as hemin (Protchenko et al., 2003 and Krainer et al., 2015, respectively).

[0327] In a further aspect it was found that overexpressing and/or co-expressing P450 helper genes in a production host cell significantly benefits production of demethylated nor-benzylisoquinoline alkaloids. Such P450 helper genes includes, but is not limited to:
[0328] a) DAP1, which encodes a heme-binding protein involved in the regulation the function of cytochrome P450 (Hughes et al., 2007);
[0329] b) HAC1, a transcription factor that modulates the unfolded protein response (Kawahara T, et al., 1997);
[0330] c) KAR2, HSP82, CNE1, SSA1, CPR6, FES1, HSP104 and STI1 involved in protein processing as well as heat shock response (Yu et al., 2017).

[0331] In a still further aspect, it was found that increasing cytosolic levels of NADPH by overexpressing and/or co-expressing genes in the pentose metabolic pathway significantly benefits production of demethylated nor-benzylisoquinoline alkaloids. Such genes include but is not limited to ZWF1 and GND1 genes from the pentose phosphate pathway (Stincone et al., 2015).

[0332] In a further aspect it was found that detoxifying the genetically modified cell from formaldehyde, a toxic by-product released during cytochrome P450 N-demethylation reaction (Wehner E P et al., 1993 and Kalász H et al., 1998), significantly benefits production of demethylated nor-benzylisoquinoline alkaloids. Lowering formation of cytosolic formaldehyde in the cell can be achieved modifying genes encoding factors regulating formaldehyde levels and/or toxicity. Such genes/factors include but is not limited to SFA1, which when overexpressed and/or co-expressed reduce formaldehyde levels and/or toxicity and thereby increase production of demethylated nor-benzylisoquinoline alkaloids.

### Functional Homologs

[0333] Functional homologs (also referred herein to as functional variants) of the enzymes/polypeptides described herein are also suitable for use in producing benzylisoquinoline alkaloid in the genetically modified host cell. A functional homolog is a polypeptide that has sequence similarity to a reference polypeptide, and that carries out one or more of the biochemical or physiological function(s) of the reference polypeptide. A functional homolog and the reference polypeptide can be a natural occurring polypeptide, and the sequence similarity can be due to convergent or divergent evolutionary events. As such, functional homologs are sometimes designated in the literature as homologs, or orthologs, or paralogs. Variants of a naturally occurring functional homolog, such as polypeptides encoded by mutants of a wild type coding sequence, can themselves be functional homologs. Functional homologs can also be created via site-directed mutagenesis of the coding sequence for a polypeptide, or by combining domains from the coding sequences for different naturally-occurring polypeptides (“domain swapping”). Techniques for modifying genes encoding functional polypeptides described herein are known and include, inter alia, directed evolution techniques, site-directed mutagenesis techniques and random mutagenesis techniques, and can be useful to increase specific activity of a polypeptide, alter substrate specificity, alter expression levels, alter subcellular location, or modify polypeptide-polypeptide interactions in a desired manner. Such modified polypeptides are considered functional homologs. The term “functional homolog” is sometimes applied to the nucleic acid that encodes a functionally homologous polypeptide.

[0334] Functional homologs can be identified by analysis of nucleotide and polypeptide sequence alignments. For example, performing a query on a database of nucleotide or polypeptide sequences can identify homologs of benzylisoquinoline alkaloid biosynthesis polypeptides. Sequence analysis can involve BLAST, Reciprocal BLAST, or PSI-BLAST analysis of non-redundant databases using a UGT amino acid sequence as the reference sequence. Amino acid sequence is, in some instances, deduced from the nucleotide sequence. Those polypeptides in the database that have greater than 40% sequence identity are candidates for further evaluation for suitability as a benzylisoquinoline alkaloid biosynthesis polypeptide. Amino acid sequence similarity allows for conservative amino acid substitutions, such as substitution of one hydrophobic residue for another or substitution of one polar residue for another. If desired, manual inspection of such candidates can be carried out to narrow the number of candidates to be further evaluated. Manual inspection can be performed by selecting those candidates that appear to have domains present in benzylisoquinoline alkaloid biosynthesis polypeptides, e.g., conserved functional domains. In some embodiments, nucleic acids and polypeptides are identified from transcriptome data based on expression levels rather than by using BLAST analysis. Methods for conservative substitution are known to the skilled person, see for example https://www.ncbi.nlm.nih.gov/pmc/articles/PMC1449787/or https://link.springer.com/article/10.1007/BF02300754

[0335] Conserved regions can be identified by locating a region within the primary amino acid sequence of a benzylisoquinoline alkaloid biosynthesis polypeptide that is a repeated sequence, forms some secondary structure (e.g., helices and beta sheets), establishes positively or negatively charged domains, or represents a protein motif or domain. See, e.g., the Pfam web site describing consensus sequences for a variety of protein motifs and domains on for example the World Wide Web at sanger.ac.uk/Software/Pfam/and pfam.janelia.org/. The information included at the Pfam database is described in Sonnhammer et al. (1998); Sonnhammer et al. (1997); and Bateman et al. (1999). Conserved regions also can be determined by aligning sequences of the same or related polypeptides from closely related species. Closely related species preferably are from the same family. In some embodiments, alignment of sequences from two different species is adequate to identify such homologs.

[0336] Typically, polypeptides that exhibit at least about 40% amino acid sequence identity are useful to identify conserved regions. Conserved regions of related polypeptides exhibit at least 45% amino acid sequence identity (e.g., at least 50%, at least 60%, at least 70%, at least 80%, or at least 90% amino acid sequence identity). In some embodiments, a conserved region exhibits at least 92%, 94%, 96%, 98%, or 99% amino acid sequence identity.

[0337] For example, polypeptides suitable for producing one or more benzylisoquinoline alkaloids (any BIA, BIA-glycoside, oripavine, glucosylated oripavine, gly-oripavine, thebaine, northebaine, nororipavine, gly-nororipavine, glucosylated nororipavine, nor-opioids or glycosylated noropioids) in a genetically modified host cell include functional homologs of TH's, NCS's, 6-OMT's, CNMT's, NMCH's, 4′-OMT's, DRS-DRR's, SAS's, SAR's, SAT's, THS's, CPR's and demethylating P450's.

[0338] Methods to modify the substrate specificity of benzylisoquinoline alkaloids pathway enzymes are known to those skilled in the art, and include without limitation site-directed/rational mutagenesis approaches, random directed evolution approaches and combinations in which random mutagenesis/saturation techniques are performed near the active site of the enzyme. For example see Osmani et al. (2009).

[0339] A candidate sequence typically has a length that is from 80% to 200% of the length of the reference sequence, e.g., 82, 85, 87, 89, 90, 93, 95, 97, 99, 100, 105, 110, 115, 120, 130, 140, 150, 160, 170, 180, 190, or 200% of the length of the reference sequence. A functional homolog polypeptide typically has a length that is from 95% to 105% of the length of the reference sequence, e.g., 90, 93, 95, 97, 99, 100, 105, 110, 115, or 120% of the length of the reference sequence, or any range between.

[0340] It will be appreciated that functional benzylisoquinoline alkaloids pathway enzymes/polypeptides can include additional amino acids that are not involved in the enzymatic activities carried out by the enzymes. In some embodiments, such enzymes are fusion proteins. The terms “chimera,” “fusion polypeptide,” “fusion protein,” “fusion enzyme,” “fusion construct,” “chimeric protein,” “chimeric polypeptide,” “chimeric construct,” and “chimeric enzyme” can be used interchangeably herein to refer to proteins engineered through the joining of two or more genes that code for different proteins. In some embodiments, a nucleic acid sequence encoding a benzylisoquinoline alkaloids pathway enzyme/polypeptide can include a tag sequence that encodes a “tag” designed to facilitate subsequent manipulation (e.g., to facilitate purification or detection), secretion, or localization of the encoded enzyme. Tag sequences can be inserted in the nucleic acid sequence encoding the polypeptide such that the encoded tag is located at either the carboxyl or amino terminus of the polypeptide. Non-limiting examples of encoded tags include green fluorescent protein (GFP), human influenza hemagglutinin (HA), glutathione S transferase (GST), polyhistidine-tag (HIS tag), and Flag™ tag (Kodak, New Haven, CT). Other examples of tags include a chloroplast transit peptide, a mitochondrial transit peptide, an amyloplast peptide, signal peptide, or a secretion tag.

[0341] In some embodiments, a fusion protein is a protein altered by domain swapping. As used herein, the term “domain swapping” is used to describe the process of replacing a domain of a first protein with a domain of a second protein. In some embodiments, the domain of the first protein and the domain of the second protein are functionally identical or functionally similar. In some embodiments, the structure and/or sequence of the domain of the second protein differs from the structure and/or sequence of the domain of the first protein. In some embodiments, a benzylisoquinoline alkaloids pathway enzyme/polypeptide is altered by domain swapping.

### Nucleotides Expressed by the Host Cell

[0342] In some aspects, the recombinant microbial host cell comprises a recombinant polynucleotide comprising a promoter operably linked to an ABC transporter, wherein the ABC transporter is a member of the ABCG/pleiotropic drug resistance (PDR) subfamily of ABC transporters or the ABCC/multi-drug resistance associated protein (MRP) subfamily of ABC transporters, and wherein the ABC transporter is capable of effluxing from the host cell one or more opioids or benzylisoquinoline alkaloids selected from a BIA, BIA-glycoside, oripavine, glucosylated oripavine, gly-oripavine, thebaine, northebaine, nororipavine, gly-nororipavine, glucosylated nororipavine, nor-opioids or glycosylated noropioids.

[0343] In some aspects the host cell of the invention capable of producing one or more one or more BIA (benzylisoquinoline alkaloids including but not limited to any BIA, BIA-glycoside, oripavine, glucosylated oripavine, gly-oripavine, thebaine, northebaine, nororipavine, gly-nororipavine, glucosylated nororipavine, nor-opioids or glycosylated noropioids) one or more additional polynucleotides or genes selected from:
[0344] a) one or more polynucleotides which is at least 20%, such as at least 40%, such as at least 50%, such as at least 60%, such as at least 70%, such as at least 80%, such as at least 90%, such as at least 95%, such as at least 96%, such as at least 97%, such as at least 98%, such as at least 99%, such as 100% identical to the DAHP synthase encoding polynucleotide comprised in SEQ ID NO: 2 or genomic DNA thereof;
[0345] b) one or more polynucleotides which is at least 20%, such as at least 40%, such as at least 50%, such as at least 60%, such as at least 70%, such as at least 80%, such as at least 90%, such as at least 95%, such as at least 96%, such as at least 97%, such as at least 98%, such as at least 99%, such as 100% identical to the chorismate mutase encoding polynucleotide comprised in SEQ ID NO: 4 or genomic DNA thereof;
[0346] c) one or more polynucleotides which is at least 20%, such as at least 40%, such as at least 50%, such as at least 60%, such as at least 70%, such as at least 80%, such as at least 90%, such as at least 95%, such as at least 96%, such as at least 97%, such as at least 98%, such as at least 99%, such as 100% identical to the TH encoding polynucleotide comprised in SEQ ID NO: 8, 10, 12, 14, 16, 18, 20, 22, 24, 26, 28, 30, 32, 34, 36, 38, 40, 42, 44, 46, 48, 50, 52, 54, 56, 58, 60, 62, 64 or 66 or genomic DNA thereof;
[0347] d) one or more polynucleotides which is at least 20%, such as at least 40%, such as at least 50%, such as at least 60%, such as at least 70%, such as at least 80%, such as at least 90%, such as at least 95%, such as at least 96%, such as at least 97%, such as at least 98%, such as at least 99%, such as 100% identical to the TH-CPR encoding polynucleotide comprised in SEQ ID NO: 68 or genomic DNA thereof;
[0348] e) one or more polynucleotides which is at least 20%, such as at least 40%, such as at least 50%, such as at least 60%, such as at least 70%, such as at least 80%, such as at least 90%, such as at least 95%, such as at least 96%, such as at least 97%, such as at least 98%, such as at least 99%, such as 100% identical to the DODC encoding polynucleotide comprised in SEQ ID NO: 70 or 72 or genomic DNA thereof;
[0349] f) one or more polynucleotides which is at least 20%, such as at least 40%, such as at least 50%, such as at least 60%, such as at least 70%, such as at least 80%, such as at least 90%, such as at least 95%, such as at least 96%, such as at least 97%, such as at least 98%, such as at least 99%, such as 100% identical to the NCS encoding polynucleotide comprised in SEQ ID NO: 74 or 77 or genomic DNA thereof;
[0350] g) one or more polynucleotides which is at least 20%, such as at least 40%, such as at least 50%, such as at least 60%, such as at least 70%, such as at least 80%, such as at least 90%, such as at least 95%, such as at least 96%, such as at least 97%, such as at least 98%, such as at least 99%, such as 100% identical to the 6-OMT encoding polynucleotide comprised in SEQ ID NO: 80 or genomic DNA thereof;
[0351] h) one or more polynucleotides which is at least 20%, such as at least 40%, such as at least 50%, such as at least 60%, such as at least 70%, such as at least 80%, such as at least 90%, such as at least 95%, such as at least 96%, such as at least 97%, such as at least 98%, such as at least 99%, such as 100% identical to the CNMT encoding polynucleotide comprised in SEQ ID NO: 83 or genomic DNA thereof;
[0352] i) one or more polynucleotides which is at least 20%, such as at least 40%, such as at least 50%, such as at least 60%, such as at least 70%, such as at least 80%, such as at least 90%, such as at least 95%, such as at least 96%, such as at least 97%, such as at least 98%, such as at least 99%, such as 100% identical to the NMCH encoding polynucleotide comprised in SEQ ID NO: 86 or 88 or genomic DNA thereof;
[0353] j) one or more polynucleotides which is at least 20%, such as at least 40%, such as at least 50%, such as at least 60%, such as at least 70%, such as at least 80%, such as at least 90%, such as at least 95%, such as at least 96%, such as at least 97%, such as at least 98%, such as at least 99%, such as 100% identical to the 4′-OMT encoding polynucleotide comprised in SEQ ID NO: 90 or genomic DNA thereof;
[0354] k) one or more polynucleotides which is at least 20%, such as at least 40%, such as at least 50%, such as at least 60%, such as at least 70%, such as at least 80%, such as at least 90%, such as at least 95%, such as at least 96%, such as at least 97%, such as at least 98%, such as at least 99%, such as 100% identical to the DRS-DRR encoding polynucleotide comprised in SEQ ID NO: 93, 95 or 97 or genomic DNA thereof;
[0355] l) one or more polynucleotides which is at least 20%, such as at least 40%, such as at least 50%, such as at least 60%, such as at least 70%, such as at least 80%, such as at least 90%, such as at least 95%, such as at least 96%, such as at least 97%, such as at least 98%, such as at least 99%, such as 100% identical to the DRS encoding polynucleotide comprised in SEQ ID NO: 99, 101, 103, 105 or 107 or genomic DNA thereof;
[0356] m) one or more polynucleotides which is at least 20%, such as at least 40%, such as at least 50%, such as at least 60%, such as at least 70%, such as at least 80%, such as at least 90%, such as at least 95%, such as at least 96%, such as at least 97%, such as at least 98%, such as at least 99%, such as 100% identical to the DRR encoding polynucleotide comprised in SEQ ID NO: 109 or 111 or genomic DNA thereof;
[0357] n) one or more polynucleotides which is at least 20%, such as at least 40%, such as at least 50%, such as at least 60%, such as at least 70%, such as at least 80%, such as at least 90%, such as at least 95%, such as at least 96%, such as at least 97%, such as at least 98%, such as at least 99%, such as 100% identical to the DRS-CPR encoding polynucleotide comprised in SEQ ID NO: 113 or 115 or genomic DNA thereof;
[0358] o) one or more polynucleotides which is at least 20%, such as at least 40%, such as at least 50%, such as at least 60%, such as at least 70%, such as at least 80%, such as at least 90%, such as at least 95%, such as at least 96%, such as at least 97%, such as at least 98%, such as at least 99%, such as 100% identical to the SAS encoding polynucleotide comprised in SEQ ID NO: 117 or 119 or genomic DNA thereof;
[0359] p) one or more polynucleotides which is at least 20%, such as at least 40%, such as at least 50%, such as at least 60%, such as at least 70%, such as at least 80%, such as at least 90%, such as at least 95%, such as at least 96%, such as at least 97%, such as at least 98%, such as at least 99%, such as 100% identical to the SAR encoding polynucleotide comprised in SEQ ID NO: 121 or genomic DNA thereof;
[0360] q) one or more polynucleotides which is at least 20%, such as at least 40%, such as at least 50%, such as at least 60%, such as at least 70%, such as at least 80%, such as at least 90%, such as at least 95%, such as at least 96%, such as at least 97%, such as at least 98%, such as at least 99%, such as 100% identical to the SAT encoding polynucleotide comprised in SEQ ID NO: 124 or genomic DNA thereof;
[0361] r) one or more polynucleotides which is at least 20%, such as at least 40%, such as at least 50%, such as at least 60%, such as at least 70%, such as at least 80%, such as at least 90%, such as at least 95%, such as at least 96%, such as at least 97%, such as at least 98%, such as at least 99%, such as 100% identical to the THS encoding polynucleotide comprised in SEQ ID NO: 130, 132, 135, 137 or 139 or genomic DNA thereof;
[0362] s) one or more polynucleotides which is at least 20%, such as at least 40%, such as at least 50%, such as at least 60%, such as at least 70%, such as at least 80%, such as at least 90%, such as at least 95%, such as at least 96%, such as at least 97%, such as at least 98%, such as at least 99%, such as 100% identical to the ODM encoding polynucleotide comprised in SEQ ID NO: 219, 221, 223, 225, 227, 229, 237, 241, 251, 253, 255 and 267 or genomic DNA thereof;
[0363] t) one or more polynucleotides which is at least 20%, such as at least 40%, such as at least 50%, such as at least 60%, such as at least 70%, such as at least 80%, such as at least 90%, such as at least 95%, such as at least 96%, such as at least 97%, such as at least 98%, such as at least 99%, such as 100% identical to the demethylase encoding polynucleotide comprised in any one of SEQ ID NO: 141, 143, 145, 147, 149, 151, 153, 155, 157, 159, 161, 163, 165, 167, 169, 171, 173, 175, 177, 179, 181, 183, 185, 187, 189, 191, 193, 195, 197, 199, 201, 203, 205, 207, 209, 211, 213, 215, 217, 219, 221, 223, 225, 227, 229, 231, 233, 235, 237, 239, 241, 243, 245, 247, 249, 251, 253, 255, 257, 259, 261, 263, 265, 267, 269, 271, 273, 275, 277, 279, 281, 283, 285, 287, 289, 291, 828, 830, 832, 834, 836, 838, 840, 842, 844, 846, 848, 850, 852, 854, 856, 858, 860, 862, 864, 866, 868 and 870 or genomic DNA thereof;
[0364] u) one or more polynucleotides which is at least 20%, such as at least 40%, such as at least 50%, such as at least 60%, such as at least 70%, such as at least 80%, such as at least 90%, such as at least 95%, such as at least 96%, such as at least 97%, such as at least 98%, such as at least 99%, such as 100% identical to the demethylase-CPR encoding polynucleotide comprised in any one of SEQ ID NO: 293, 295, 297, 299, 301, 303, 304 or 306 or genomic DNA thereof; and
[0365] v) one or more polynucleotides which is at least 20%, such as at least 40%, such as at least 50%, such as at least 60%, such as at least 70%, such as at least 80%, such as at least 90%, such as at least 95%, such as at least 96%, such as at least 97%, such as at least 98%, such as at least 99%, such as 100% identical to the transporter encoding polynucleotide comprised in SEQ ID NO: 308, 310, 312, 314, 316, 318, 320, 322, 324, 326, 328, 330, 332, 334, 336, 338, 340, 342, 344, 346, 348, 350, 352, 354, 356, 358, 360, 362, 364, 366, 368, 370, 372, 374, 376, 378, 380, 382, 384, 386, 388, 390, 392, 394, 396, 398, 400, 402, 404, 406, 408, 410, 412, 414, 416, 418, 420, 422, 424, 426, 428, 430, 432, 434, 436, 438, 440, 442, 444, 446, 448, 450, 452, 454, 456, 458, 460, 462, 464, 466, 468, 470, 472, 474, 476, 478, 480, 482, 484, 486, 488, 490, 492, 494, 496, 498, 500, 502, 504, 506, 508, 510, 512, 514, 516, 518, 520, 522, 524, 526, 528, 530, 532, 534, 536, 538, 540, 542, 544, 546, 548, 550, 552, 554, 556, 558, 560, 562, 564, 566, 568, 570, 572, 574, 576, 578, 580, 582, 584, 586, 588, 590, 592, 594, 596, 598, 600, 602, 604, 606, 608, 610, 612, 614, 616, 618, 620, 622, 624, 626, 628, 630, 632, 634, 636, 638, 640, 642, 644, 646, 648, 650, 652, 654, 656, 658, 660, 662, 734, 736, 777, 779, 781, 783, 785, 787, 789, 781, 783, 785, 787, 789, 791, 793, 796, 798, 800, 801, 802, 804, 806, 808, 810, 812, 814, 816, 818, 820, 822, 824, 826 or genomic DNA thereof.

[0366] Any nucleotides disclosed herein may be codon optimized for expression in a particular selected host using methods available to the skilled person or commercially available from technology providers-see for example Gene Reports Volume 9, December 2017, Pages 46-53: Strategies of codon optimization for high-level heterologous protein expression in microbial expression systems, incorporated herein by reference. Examples of codon optimized genes are those of SEQ ID NOS: 771, 773, 775, 777, 779, 781, 783, 785, 787, 789, 791 and 793.

### Host Cells.

[0367] The cell of the invention may be any host cell suitable for hosting and expressing the BIA efflux transporters of the invention and capable of one or more benzylisoquinoline alkaloids (including but not limited to any BIA, BIA-glycoside, oripavine, glucosylated oripavine, gly-oripavine, thebaine, northebaine, nororipavine, gly-nororipavine, glucosylated nororipavine, nor-opioids or glycosylated noropioids).

[0368] In particular the cell of the invention may be a eukaryote cell selected from the group consisting of mammalian, insect, plant, or fungal cells In another embodiment the cell is a fungal cell selected from the phylas consisting of Ascomycota, Basidiomycota, Neocallimastigomycota, Glomeromycota, Blastocladiomycota, Chytridiomycota, Zygomycota, Oomycota and Microsporidia. A particularly useful fungal cell is a yeast cell selected from the group consisting of ascosporogenous yeast (Endomycetales), basidiosporogenous yeast, and Fungi Imperfecti yeast (Blastomycetes). Such yeast cells may further be selected from the genera consisting of Saccharomyces, Kluveromyces, Candida, Pichia, Debaromyces, Hansenula, Yarrowia, Zygosaccharomyces, and Schizosaccharomyces. More specifically the yeast cell may be selected from the species consisting of Kluyveromyces lactis, Saccharomyces carlsbergensis, Saccharomyces cerevisiae, Saccharomyces diastaticus, Saccharomyces douglasii, Saccharomyces kluyveri, Saccharomyces norbensis, Saccharomyces oviformis, and Yarrowia lipolytica.

[0369] An alternative fungal host cell of the invention is a filamentous fungal cell. Such filamentous fungal cell may be selected from the phylas consisting of Ascomycota, Eumycota and Oomycota, more specifically selected from the genera consisting of Acremonium, Aspergillus, Aureobasidium, Bjerkandera, Ceriporiopsis, Chrysosporium, Coprinus, Corio/us, Cryptococcus, Filibasidium, Fusarium, Humicola, Magnaporthe, Mucor, Myceliophthora, Neocallimastix, Neurospora, Paecilomyces, Penicillium, Phanerochaete, Phlebia, Piromyces, Pleurotus, Schizophyllum, Talaromyces, Thermoascus, Thielavia, Tolypocladium, Trametes, and Trichoderma. In important embodiments the filamentous fungal cell may be selected from the species consisting of Aspergillus awamori, Aspergillus foetidus, Aspergillus fumigatus, Aspergillus japonicus, Aspergillus nidulans, Aspergillus niger, Aspergillus oryzae, Bjerkandera adusta, Ceriporiopsis aneirina, Ceriporiopsis caregiea, Ceriporiopsis gilvescens, Ceriporiopsis pannocinta, Ceriporiopsis rivulosa, Ceriporiopsis subrufa, Ceriporiopsis subvermispora, Chrysosporiuminops, Chrysosporiumkeratinophilum, Chrysosporium lucknowense, Chrysosporium merdarium, Chrysosporium pannicola, Chrysosporium queenslandicum, Chrysosporium tropicum, Chrysosporium zonatum, Coprinus cinereus, Coriolus hirsutus, Fusarium bactridioides, Fusarium cerealis, Fusarium crookwellense, Fusarium culmorum, Fusarium graminearum, Fusarium graminum, Fusarium heterosporum, Fusarium negundi, Fusarium oxysporum, Fusarium reticulatum, Fusarium roseum, Fusarium sambucinum, Fusarium sarcochroum, Fusarium sporotrichioides, Fusarium sulphureum, Fusarium torulosum, Fusarium trichothecioides, Fusarium venenatum, Humicola insolens, Humicola lanuginosa, Mucor miehei, Myceliophthora thermophila, Neurospora crassa, Penicillium purpurogenum, Phanerochaete chrysosporium, Phlebia radiata, Pleurotus eryngii, Thielavia terrestris, Trametes villosa, Trametes versicolor, Trichoderma harzianum, Trichoderma koningii, Trichoderma longibrachiatum, Trichoderma reesei, and Trichoderma viride.

[0370] In one embodiment the cell is a plant cell for example of the genus Physcomitrella or Papaver, in particular Papaver somniferum. Other plant cells can be of the family Solanaceae, such genuses of Nicotiana, such as Nicotiana benthamiana. In addition to plant cells the invention also provides an isolated plant, e.g., a transgenic plant, plant part comprising the benzylisoquinoline alkaloid pathway polypeptides of the invention and producing the benzylisoquinoline alkaloids of the invention in useful quantities. The compound may be recovered from the plant or plant part. The transgenic plant can be dicotyledonous (a dicot) or monocotyledonous (a monocot). Examples of monocot plants are grasses, such as meadow grass (blue grass, Poa), forage grass such as Festuca, Lolium, temperate grass, such as Agrostis, and cereals, e.g., wheat, oats, rye, barley, rice, sorghum, and maize (corn). Examples of dicot plants are tobacco, legumes, such as lupins, potato, sugar beet, pea, bean and soybean, and cruciferous plants (family Brassicaceae), such as cauliflower, rape seed, and the closely related model organism Arabidopsis thaliana. Examples of plant parts are stem, callus, leaves, root, fruits, seeds, and tubers as well as the individual tissues comprising these parts, e.g., epidermis, mesophyll, parenchyme, vascular tissues, meristems. Specific plant cell compartments, such as chloroplasts, apoplasts, mitochondria, vacuoles, peroxisomes and cytoplasm are also considered to be a plant part. Furthermore, any plant cell, whatever the tissue origin, is considered to be a plant part. Likewise, plant parts such as specific tissues and cells isolated to facilitate the utilization of the invention are also considered plant parts, e.g., embryos, endosperms, aleurone and seed coats. Also included within the scope of the present invention is any the progeny of such plants, plant parts, and plant cells. The transgenic plant or plant cells comprising the operative pathway of the invention and produce the compound of the invention may be constructed in accordance with methods known in the art. In short, the plant or plant cell is constructed by incorporating one or more expression vectors of the invention into the plant host genome or chloroplast genome and propagating the resulting modified plant or plant cell into a transgenic plant or plant cell. The expression vector conveniently comprises the polynucleotide construct of the invention. The choice of regulatory sequences, such as promoter and terminator sequences and optionally signal or transit sequences, is determined, for example, on the basis of when, where, and how the pathway polypeptides is desired to be expressed. For instance, the expression of a gene encoding a pathway enzyme polypeptide may be constitutive or inducible, or may be developmental, stage or tissue specific, and the gene product may be targeted to a specific tissue or plant part such as seeds or leaves. Regulatory sequences are, for example, described by Tague et al., 1988, Plant Physiology 86:506. For constitutive expression, the 358-CaMV, the maize ubiquitin 1, or the rice actin 1 promoter may be used (Franck et al., 1980, Cell 21:285-294; Christensen et al., 1992, Plant Mol. Biol. 18:675-689; Zhang et al., 1991, Plant Cell 3:1155-1165). Organ-specific promoters may be, for example, a promoter from storage sink tissues such as seeds, potato tubers, and fruits (Edwards and Coruzzi, 1990, Ann. Rev. Genet. 24:275-303), or from metabolic sink tissues such as meristems (Ito et al., 1994, Plant Mol. Biol. 24:863-878), a seed specific promoter such as the glutelin, prolamin, globulin, or albumin promoter from rice (Wu et al., 1998, Plant Cell Physiol. 39:885-889), a Vicia faba promoter from the legumin B4 and the unknown seed protein gene from Vicia faba (Conrad et al., 1998, J. Plant Physiol. 152:708-711), a promoter from a seed oil body protein (Chen et al., 1998, Plant Cell Physiol. 39:935-941), the storage protein napA promoter from Brassica napus, or any other seed specific promoter known in the art, e.g., as described in WO 91/14772. Furthermore, the promoter may be a leaf specific promoter such as the rbcs promoter from rice or tomato (Kyozuka et al., 1993, Plant Physiol. 102:991-1000), the chlorella virus adenine methyltransferase gene promoter (Mitra and Higgins, 1994, Plant Mol. Biol. 26:85-93), the aldP gene promoter from rice (Kagaya et al., 1995, Mol. Gen. Genet. 248:668-674), or a wound inducible promoter such as the potato pin2 promoter (Xu et al., 1993, Plant Mol. Biol. 22:573-588). Likewise, the promoter may be induced by abiotic treatments such as temperature, drought, or alterations in salinity or induced by exogenously applied substances that activate the promoter, e.g., ethanol, oestrogens, plant hormones such as ethylene, abscisic acid, and gibberellic acid, and heavy metals. A promoter enhancer element may also be used to achieve higher expression in the plant. For instance, the promoter enhancer element may be an intron that is placed between the promoter and the polynucleotide encoding a polypeptide or domain. For instance, Xu et al., 1993, supra, disclose the use of the first intron of the rice actin 1 gene to enhance expression. The selectable marker gene and any other parts of the expression construct may be chosen from those available in the art. The polynucleotide construct or expression vector is incorporated into the plant genome according to conventional techniques known in the art, including Agrobacterium-mediated transformation, virus-mediated transformation, microinjection, particle bombardment, biolistic transformation, and electroporation (Gasser et al., 1990, Science 244:1293; Potrykus, 1990, Bio/Technology 8:535; Shimamoto et al., 1989, Nature 338:274). Agrobacterium tumefaciens-mediated gene transfer is a method for generating transgenic dicots (for a review, see Hooykas and Schilperoort, 1992, Plant Mol. Biol. 19:15-38) and for transforming monocots, although other transformation methods may be used for these plants. A method for generating transgenic monocots is particle bombardment (microscopic gold or tungsten particles coated with the transforming DNA) of embryonic calli or developing embryos (Christou, 1992, Plant J. 2:275-281; Shimamoto, 1994, Curr. Opin. Biotechnol. 5:158-162; Vasil et al., 1992, Bio/Technology 10:667-674). An alternative method for transformation of monocots is based on protoplast transformation as described by Omirulleh et al., 1993, Plant Mol. Biol. 21:415-428. Additional transformation methods include those described in U.S. U.S. Pat. Nos. 6,395,966 and 7,151,204 (both incorporated herein by reference in their entirety). Following transformation, the transformants having incorporated the expression vector or polynucleotide construct of the invention are selected and regenerated into whole plants according to methods well known in the art. Often the transformation procedure is designed for the selective elimination of selection genes either during regeneration or in the following generations by using, for example, co-transformation with two separate T-DNA constructs or site specific excision of the selection gene by a specific recombinase. In addition to direct transformation of a particular plant genotype with a polynucleotide construct of the invention, transgenic plants may be made by crossing a plant comprising the construct to a second plant lacking the construct. For example, a polynucleotide construct encoding a glycosyl transferase of the invention can be introduced into a particular plant variety by crossing, without the need for ever directly transforming a plant of that given variety. Therefore, the invention encompasses not only a plant directly regenerated from cells which have been transformed in accordance with the invention, but also the progeny of such plants. As used herein, progeny may refer to the offspring of any generation of a parent plant prepared in accordance with the present invention. Such progeny may include a polynucleotide construct of the invention. Crossing results in the introduction of a transgene into a plant line by cross pollinating a starting line with a donor plant line. Non-limiting examples of such steps are described in U.S. Pat. No. 7,151,204. Plants may be generated through a process of backcross conversion. For example, plants include plants referred to as a backcross converted genotype, line, inbred, or hybrid. Genetic markers may be used to assist in the introgression of one or more transgenes of the invention from one genetic background into another. Marker assisted selection offers advantages relative to conventional breeding in that it can be used to avoid errors caused by phenotypic variations. Further, genetic markers may provide data regarding the relative degree of elite germplasm in the individual progeny of a particular cross. For example, when a plant with a desired trait which otherwise has a non-agronomically desirable genetic background is crossed to an elite parent, genetic markers may be used to select progeny which not only possess the trait of interest, but also have a relatively large proportion of the desired germplasm. In this way, the number of generations required to introgress one or more traits into a particular genetic background is minimized.

[0371] The host microbial cells of the invention comprising a BIA efflux transporter and capable of producing one or more benzylisoquinoline alkaloid (including but not limited to any BIA, BIA-glycoside, oripavine, glucosylated oripavine, gly-oripavine, thebaine, northebaine, nororipavine, gly-nororipavine, glucosylated nororipavine, nor-opioids or glycosylated noropioids), may be even further modified by one or more of
[0372] a) attenuating, disrupting and/or deleting one or more native or endogenous genes of the cell;
[0373] b) inserting two or more copies of polynucleotides encoding the P450s, the demethylase-CPR's and/or one or more of the polypeptides comprised in the operative metabolic pathway;
[0374] c) increasing the amount of a substrate for at least one polypeptide of the operative metabolic pathway; and/or
[0375] d) increasing tolerance towards one or more substrates, intermediates, or product molecules from the operative metabolic pathway.

### Polynucleotide Constructs and Expression Vectors

[0376] In a separate aspect the invention also provides a polynucleotide construct comprising a polynucleotide sequence encoding a heterologous enzymes or transporter protein of the invention operably linked to one or more control sequences, which direct expression of the heterologous enzyme or transporter protein in the host cell harbouring the polynucleotide construct. Conditions for the expression should be compatible with the control sequences. In particular, the control sequence is heterologous to the polynucleotide encoding the heterologous enzyme or transporter protein and in one embodiment the polynucleotide sequence encoding the heterologous enzyme or transporter protein and the control sequence are both heterologous to the host cell comprising the construct. In one embodiment the polynucleotide construct is an expression vector, comprising the polynucleotide sequence encoding the heterologous enzyme or transporter protein of the invention operably linked to the one or more control sequences.

[0377] Polynucleotides may be manipulated in a variety of ways allow expression of the heterologous enzyme or transporter protein. Manipulation of the polynucleotide prior to its insertion into an expression vector may be desirable or necessary depending on the expression vector. The techniques for modifying polynucleotides utilizing recombinant DNA methods are well known in the art.

[0378] The control sequence may be a promoter, which is a polynucleotide that is recognized by a host cell for expression of a polynucleotide. The promoter contains transcriptional control sequences that mediate the expression of the polypeptide. The promoter may be any polynucleotide that shows transcriptional activity in the host cell including mutant, truncated, and hybrid promoters, and may be obtained from genes encoding extracellular or intracellular polypeptides either homologous or heterologous to the host cell. The promoter may also be an inducible promoter.

[0379] Examples of suitable promoters for directing transcription of the nucleic acid construct of the invention in fungal host cell are promoters obtained from the genes for Aspergillus nidulans acetamidase, Aspergillus niger neutral α-amylase, Aspergillus niger acid stable α-amylase, Aspergillus niger or Aspergillus awamori glucoamylase (glaA), Aspergillus gpdA promoter, Aspergillus oryzae TAKA amylase, Aspergillus oryzae alkaline protease, Aspergillus oryzae triose phosphate isomerase, A. niger or A. awamori endoxylanase (xInA) or β-xylosidase (xInD), Fusarium oxysporum trypsin-like protease (WO 96/00787), Fusarium venenatum amyloglucosidase (WO2000/56900), Fusarium venenatum Dania (WO 00/56900), Fusarium venenatum Quinn (WO 00/56900), Rhizomucor miehei lipase, Rhizomucor miehei aspartic proteinase, Trichoderma reesei β-glucosidase, Trichoderma reesei cellobiohydrolase I, Trichoderma reesei cellobiohydrolase II, Trichoderma reesei endoglucanase I, Trichoderma reesei endoglucanase II, Trichoderma reesei endoglucanase III, Trichoderma reesei endoglucanase IV, Trichoderma reesei endoglucanase V, Trichoderma reesei xylanase I, Trichoderma reesei xylanase II, Trichoderma reesei β-xylosidase, as well as the NA2-tpi promoter and mutant, truncated, and hybrid promoters thereof. NA2-tpi promoter is a modified promoter from an Aspergillus neutral α-amylase gene in which the untranslated leader has been replaced by an untranslated leader from an Aspergillus triose phosphate isomerase gene. Examples of such promoters include modified promoters from an Aspergillus niger neutral α-amylase gene in which the untranslated leader has been replaced by an untranslated leader from an Aspergillus nidulans or Aspergillus oryzae triose phosphate isomerase gene. Other examples of promoters are the promoters described in WO2006/092396, WO2005/100573 and WO2008/098933, incorporated herein by reference.

[0380] Examples of suitable promoters for directing transcription of the nucleic acid construct of the invention in a yeast host include the glyceraldehyde-3-phosphate dehydrogenase promoter, PgpdA or promoters obtained from the genes for Saccharomyces cerevisiae enolase (EN0-1), Saccharomyces cerevisiae galactokinase (GAL1), Saccharomyces cerevisiae alcohol dehydrogenase/glyceraldehyde-3-phosphate dehydrogenase (ADH1, ADH2/GAP), Saccharomyces cerevisiae triose phosphate isomerase (TPI), Saccharomyces cerevisiae metallothionein (CUP1), and Saccharomyces cerevisiae 3-phosphoglycerate kinase. Other useful promoters for yeast host cells are described by Romanos et al., 1992, Yeast 8:423-488. Selecting a suitable promoter for expression in yeast is well know and is well understood by persons skilled in the art.

[0381] The control sequence may also be a transcription terminator, which is recognized by a host cell to terminate transcription. The terminator is operably linked to the 3′-terminus of the polynucleotide encoding the polypeptide. Any terminator that is functional in the host cell may be used.

[0382] Useful terminators for fungal host cells can be obtained from the genes encoding Aspergillus nidulans anthranilate synthase, Aspergillus niger glucoamylase, Aspergillus niger α-glucosidase, Aspergillus oryzae TAKA amylase, and Fusarium oxysporum trypsin-like protease; while useful terminators for yeast host cells can be obtained from the genes for Saccharomyces cerevisiae enolase, Saccharomyces cerevisiae cytochrome C (CYC1), and Saccharomyces cerevisiae glyceraldehyde-3-phosphate dehydrogenase. Other useful terminators for yeast host cells are described by Romanos et al., 1992, supra.

[0383] The control sequence may also be an mRNA stabilizer region downstream of a promoter and upstream of the coding sequence of a gene which increases expression of the gene.

[0384] The control sequence may also be a leader, a non-translated region of an mRNA that is important for translation by the host cell. The leader is operably linked to the 5′-terminus of the polynucleotide encoding the polypeptide. Any leader that is functional in the host cell may be used.

[0385] Useful leaders for fungal host cells can be obtained from the genes for Aspergillus oryzae TAKA amylase and Aspergillus nidulans triose phosphate isomerase, while useful leaders for yeast host cells can be obtained from the genes for Saccharomyces cerevisiae enolase (EN0-1), Saccharomyces cerevisiae 3-phosphoglycerate kinase, Saccharomyces cerevisiae α-factor, and Saccharomyces cerevisiae alcohol dehydrogenase/glyceraldehyde-3-phosphate dehydrogenase (ADH2/GAP).

[0386] The control sequence may also be a polyadenylation sequence; a sequence operably linked to the 3′-terminus of the polynucleotide and, when transcribed, is recognized by the host cell as a signal to add polyadenosine residues to transcribed mRNA. Any polyadenylation sequence that is functional in the host cell may be used. Useful polyadenylation sequences for fungal host cells can be obtained from the genes for Aspergillus nidulans anthranilate synthase, Aspergillus niger glucoamylase, Aspergillus niger α-glucosidase Aspergillus oryzae TAKA amylase, and Fusarium oxysporum trypsin-like protease; while useful polyadenylation sequences for yeast host cells are described by Guo and Sherman, 1995, Mol. Cellular Biol. 15:5983-5990.

[0387] It may also be desirable to add regulatory sequences that regulate expression of the polypeptide relative to the growth of the host cell. Examples of regulatory systems are those that cause expression of the gene to be turned on or off in response to a chemical or physical stimulus, including the presence of a regulatory compound. In fungi, the Aspergillus niger glucoamylase promoter, Aspergillus oryzae TAKA α-amylase promoter, and Aspergillus oryzae glucoamylase promoter may be used; while in yeast, the ADH2 system or GAL 1 system may be used. Other examples of regulatory sequences are those that allow for gene amplification. In eukaryotic systems, these regulatory sequences include the dihydrofolate reductase gene that is amplified in the presence of methotrexate, and the metallothionein genes that are amplified with heavy metals.

[0388] Various nucleotide sequences in addition to the polynucleotide construct of the invention may be joined together to produce a recombinant expression vector, which may include one or more convenient restriction sites to allow for insertion or substitution of the polynucleotide sequence encoding the P450 of the invention at such sites. The recombinant expression vector may be any vector (e.g., a plasmid or virus or chromosomal) that can be conveniently subjected to recombinant DNA procedures and can bring about expression of the P450 encoding polynucleotide. The choice of the vector will typically depend on the compatibility of the vector with the host cell into which the vector is to be introduced. The vector may be an autonomously replicating vector, i.e., a vector that exists as an extrachromosomal entity, the replication of which is independent of chromosomal replication, e.g., a plasmid (linear or closed circular plasmid), an extrachromosomal element, a minichromosome, or an artificial chromosome. The vector may contain any means for assuring self-replication. Alternatively, the vector may, when introduced into the host cell, integrate into the genome and replicate together with the chromosome(s) into which it has been integrated. Furthermore, a single vector or plasmid or two or more vectors or plasmids that together contain the total DNA to be introduced into the genome of the host cell, or a transposon, may be used.

[0389] The vector may contain one or more selectable markers that permit easy selection of transformed, transfected, transduced, or the like cells. A selectable marker is a gene from which the product provides for biocide or viral resistance, resistance to heavy metals, prototrophy to auxotrophs, and the like. Useful selectable markers for fungal host cells include amdS (acetamidase), argB (ornithine carbamoyltransferase), bar (phosphinothricin acetyltransferase), hph (hygromycin phosphotransferase), niaD (nitrate reductase), pyrG (orotidine-5′-phosphate decarboxylase), sC (sulfate adenyltransferase), and trpC (anthranilate synthase), as well as equivalents thereof. Useful selectable markers for yeast host cells include, but are not limited to, ADE2, HIS3, LEU2, LYS2, MET3, TRP1, and URA3.

[0390] The vector may further contain element(s) that permits integration of the vector into genome of the host cell or permits autonomous replication of the vector in the cell independent of the genome. For integration into the host cell genome, the vector may rely on the polynucleotide encoding the P450 or any other element of the vector for integration into the genome by homologous or non-homologous recombination. Alternatively, the vector may contain additional polynucleotides for directing integration by homologous recombination into the genome of the host cell at precise location(s) in the chromosome(s). To increase the likelihood of integration at a precise location, the integrational elements should contain a sufficient number of nucleic acids, such as 100 to 10,000 base pairs, such as 400 to 10,000 base pairs, and such as 800 to 10,000 base pairs, which have a high degree of sequence identity to the corresponding target sequence to enhance the probability of homologous recombination. The integrational elements may be any sequence that is homologous with the target sequence in the genome of the host cell. Furthermore, the integrational elements may be non-encoding or encoding polynucleotides. On the other hand, the vector may be integrated into the genome of the host cell by non-homologous recombination.

[0391] For autonomous replication, the vector may further comprise an origin of replication enabling the vector to replicate autonomously in the host cell in question. The origin of replication may be any plasmid replicator mediating autonomous replication that functions in a cell. The term “origin of replication” or “plasmid replicator” refers to a polynucleotide that enables a plasmid or vector to replicate in vivo. Useful origins of replication for fungal cells include AMA 1 and ANS1 (Gems et al., 1991, Gene 98:61-67; Cullen et al., 1987, Nucleic Acids Res. 15:9163-9175; WO 00/24883). Isolation of the AMA 1 sequence and construction of plasmids or vectors comprising the gene can be accomplished using the methods disclosed in WO2000/24883. Useful origins of replication for yeast host cells are the 2-micron origin of replication, ARS1, ARS4, the combination of ARS1 and CEN3, and the combination of ARS4 and CEN6.

[0392] As mentioned, supra, more than one copy of a polynucleotide encoding the P450 of the invention may be inserted into a host cell to increase production of the P450. An increase in the copy number can be obtained by integrating one or more additional copies of the enzyme coding sequence into the host cell genome or by including an amplifiable selectable marker gene with the polynucleotide, so that cells containing amplified copies of the selectable marker gene- and thereby additional copies of the polynucleotide—can be selected by cultivating the cells in the presence of the appropriate selectable agent. The procedures used to ligate the elements described above to construct the recombinant expression vectors of the present disclosure are well known to one skilled in the art (see, e.g., Sambrook et al., 1989, supra).

[0393] In alignment with the above the vehicles of this disclose also include those comprising a microbial host cell comprising the polynucleotide construct as described, supra.

### Cultures

[0394] The invention also provides a cell culture, comprising any recombinant microbial host cell of the invention comprising a BIA-efflux transporter and capable of producing one or more BIA (benzylisoquinoline alkaloids including but not limited to any BIA, BIA-glycoside, oripavine, glucosylated oripavine, gly-oripavine, thebaine, northebaine, nororipavine, gly-nororipavine, glucosylated nororipavine, nor-opioids or glycosylated noropioids), and a growth medium. Suitable growth mediums for host cells such as mammalian, insect, plant, fungal and/or yeast cells are known in the art. Various recognized media are known by those skilled in the art for host cell cultivation. Complex media can be used which contain multi-component ingredients such as yeast extract, peptone, tryptic digests, molasses, and casamino acids. For example, a commonly used complex medium for yeasts is YPD (Sigma Aldrich). Alternatively, media can be defined, or minimal, meaning the exact composition is known. Commonly used defined media for yeasts includes Synthetic Minimal medium, Synthetic Complete medium (Sigma Aldrich), Yeast Nitrogen Base, Yeast Synthetic drop-out medium, DELFT synthetic medium, and Verduyne medium. A defined medium or complex medium may be modified from the standard recipe or supplemented with additional components using routine optimization techniques known to those skilled in the art, depending on the specific strain requirements, length and size of fermentation, and the specific fermentation vessel employed. For example, one or more metals (including trace metals), chelators/complexing agents, nitrogen sources, cofactors and vitamins can be used to supplement fermentation media to improve growth and/or productivity. Yeast extract may be added to defined media in concentrations of, for example 0.1-25 g/L, or 0.5-10 g/L. Sources of divalent cations, such as calcium chloride, may be added at 0.05-5 g/L, or from about 0.1-0.5 g/L. Other divalent cations such as manganese can be added to a final concentration of 2-100 mg/L, or 10-50 mg/L. In some embodiments, ferrous sulfate can be added to final concentrations of 0.5-100 mg/L, or 5-50 mg/L. In some embodiments, 0.01-0.04 mM copper (II) is used. In some embodiments, ZnSO4 heptahdyrate can be used from a concentration of 25-150 mg/L. In some embodiments 7-12 mMol Mg is used. In some embodiments, different sources of monovalent salts are used, such as potassium potassium sulfate and/or potassium phosphate (monobasic or dibasic). In some embodiments, chelators/complexing agents such as EDTA and citrate may be used to bind trace metals, such as 0-200 mg/L EDTA or citrate may be used. In some embodiments, the trace vitamins may be optimized for a particular strain and fermentation, for example biotin, inositol, pantothenate, or pyridoxine. As an example, inositol can be modified to use 0.15-5 mM final concentrations in the medium. One skilled in the art knows that different carbon sources in addition to glucose (dextrose) can be used, depending on the host organism and their catabolic enzymes and transport systems. Some organisms can utilize lactose, glycerol, fructose, sucrose, maltose, pyruvate, succinate, fumarate, malate, or carbohydrates such as cellobiose and starch. Some sources of sugars can be complex, such as molasses. One skilled in the art knows that different nitrogen sources may be used for growth and production. For example, ammonium, amino acids, peptides and proteins, or urea.

### Methods of Producing Compounds of the Invention.

[0395] The invention also provides a method for producing one or more opiate or benzylisoquinoline alkaloid (such as any BIA, BIA-glycoside, oripavine, glucosylated oripavine, gly-oripavine, thebaine, northebaine, nororipavine, gly-nororipavine, glucosylated nororipavine, nor-opioids or glycosylated noropioids) and/or a derivative thereof comprising:
[0396] a) culturing the cell culture of the invention at conditions allowing the cell to produce the benzylisoquinoline alkaloid; and
[0397] b) optionally recovering and/or isolating the benzylisoquinoline alkaloid.

[0398] In some aspects, the one or more opiate or benzylisoquinoline alkaloid (such as any BIA, BIA-glycoside, oripavine, glucosylated oripavine, gly-oripavine, thebaine, northebaine, nororipavine, gly-nororipavine, glucosylated nororipavine, nor-opioids or glycosylated noropioids) is recovered and/or isolated from microbial host cells of the current invention. In other aspects, the one or more opiate or benzylisoquinoline alkaloid (such as any BIA, BIA-glycoside, oripavine, glucosylated oripavine, gly-oripavine, thebaine, northebaine, nororipavine, gly-nororipavine, glucosylated nororipavine, nor-opioids or glycosylated noropioids) is recovered and/or isolated from the cell culture medium after culturing the microbial host cells of the current invention. In further aspects, the one or more opiate or benzylisoquinoline alkaloid (such as any BIA, BIA-glycoside, oripavine, glucosylated oripavine, gly-oripavine, thebaine, northebaine, nororipavine, gly-nororipavine, glucosylated nororipavine, nor-opioids or glycosylated noropioids) is recovered and/or isolated from from microbial host cells of the current invention and from the cell culture medium after culturing the microbial host cells of the current invention. The cell culture can be cultivated in a nutrient medium and at conditions suitable for production of the nororipavine glucoside and/or nororipavine of the invention and/or propagating cell count using methods known in the art. For example, the culture may be cultivated by shake flask cultivation, or small-scale or large-scale fermentation (including continuous, batch, fed-batch, feed and draw, or solid-state fermentations) in laboratory or industrial fermentors in a suitable medium and under conditions allowing the host cells to grow and/or propagate, optionally to be recovered and/or isolated.

[0399] The cultivation can take place in a suitable nutrient medium comprising carbon and nitrogen sources and inorganic salts, using procedures known in the art. Suitable media are available from commercial suppliers or may be prepared according to published recipes (e.g. from catalogues of the American Type Culture Collection). The selection of the appropriate medium may be based on the choice of host cell and/or based on the regulatory requirements for the host cell. Such media are available in the art. The medium may, if desired, contain additional components favoring the transformed expression hosts over other potentially contaminating microorganisms. Accordingly, in an embodiment a suitable nutrient medium comprises a carbon source (e.g. glucose, maltose, molasses, starch, cellulose, xylan, pectin, lignocellolytic biomass hydrolysate, etc.), a nitrogen source (e.g. ammonium sulphate, ammonium nitrate, ammonium chloride, etc.), an organic nitrogen source (e.g. yeast extract, malt extract, peptone, etc.) and inorganic nutrient sources (e.g. phosphate, magnesium, potassium, zinc, iron, etc.).

[0400] The cultivation of the host cell may be performed over a period of from about 0.5 to about 50 days. The cultivation process may be a batch process, continuous or fed-batch process, suitably performed at a temperature in the range of 10-50° C. or 10-40° C., for example, from about 15° C. to about 35° C. and/or at a pH, for example, from about 2 to about 10. Preferred fermentation conditions for yeast and filamentous fungi are a temperature in the range of from about 25° C. to about 55° C. and at a pH of from about 3 to about 9. The appropriate conditions are usually selected based on the choice of host cell. Accordingly, in an embodiment the method of the invention further comprises one or more elements selected from:
[0401] a) culturing the cell culture in a nutrient medium;
[0402] b) culturing the cell culture under aerobic or anaerobic conditions
[0403] c) culturing the cell culture under agitation;
[0404] d) culturing the cell culture at a temperature of between 20 to 40° C.;
[0405] e) culturing the cell culture at a pH of between 3-9; and
[0406] f) culturing the cell culture for between 10 hours to 50 days.

[0407] In a special embodiment wherein the host cell of the invention expresses a demethylase converting oripavine to nororipavine in the cell, a demethylase-CPR and a transporter, it has been found that for optimal production of nororipavine at a pH from 3.5 to 6.5, such as from 4.0 to 6.0, such as about 4.5 to 5.5 should be maintained for the culturation/fermentation.

[0408] The cell culture of the invention may be recovered and/or isolated using methods known in the art. In some aspects, the the compound(s) may be recovered from the nutrient medium by conventional procedures including, but not limited to, centrifugation, filtration, spray-drying, or lyophilization. In a particular embodiment the method includes a recovery and/or isolation step comprising separating a liquid phase of the cell or cell culture from a precipitate, sediment or solid phase of the cell or cell culture to obtain a supernatant and a solids phase. The supernatant and/or solids phase may comprise the one or more opiate or benzylisoquinoline alkaloid (such as any BIA, BIA-glycoside, oripavine, glucosylated oripavine, gly-oripavine, thebaine, northebaine, nororipavine, gly-nororipavine, glucosylated nororipavine, nor-opioids or glycosylated noropioids). In some aspects, the benzylisoquinoline alkaloid is present in the supernatant and is also present partly associated with the host cells and cell debris and should be washed or extracted from the cells with an appropriate solvent or water prior to supplementing the supernatant and subjecting the liquid phase to one or more steps selected from:
[0409] a) contacting the supernatant with one or more adsorbent resins in order to obtain at least a portion of the produced benzylisoquinoline alkaloid, then optionally recovering the benzylisoquinoline alkaloid from the resin in a concentrated solution prior to precipitation or crystallisation of the benzylisoquinoline alkaloid;
[0410] b) contacting the supernatant with one or more ion exchange or reversed-phase chromatography columns in order to obtain at least a portion of the benzylisoquinoline alkaloid, then optionally recovering the benzylisoquinoline alkaloid from the resin in a concentrated solution prior to precipitation or crystallisation of the benzylisoquinoline alkaloid;
[0411] c) extracting the benzylisoquinoline alkaloid from the supernatant, such as by liquid-liquid extraction into an immisible solvent, then optionally evaporating the solvent to concentrate and precipitate the benzylisoquinoline alkaloid or performing further liquid-liquid extraction to recover and concentrate benzylisoquinoline alkaloid prior to crystallisation or precipitation or in order to directly perform a further chemical reaction on benzylisoquinoline alkaloid; and
[0412] d) evaporating the solvent of the supernatant to concentrate or precipitate the benzylisoquinoline alkaloid;
   thereby recovering and/or isolating the benzylisoquinoline alkaloid benzylisoquinoline alkaloid benzylisoquinoline alkaloid. In some embodiments the BIA-glycoside is deglycosylated prior to separation of cell solids from a liquid supernatant. In some embodiments, the deglycosylation is done as part of the purification steps such as those listed in steps (a)-(d) above.

[0413] The method of the invention may comprise one or more in vitro steps in the process of producing the one or more opiate or benzylisoquinoline alkaloid (such as any BIA, BIA-glycoside, oripavine, glucosylated oripavine, gly-oripavine, thebaine, northebaine, nororipavine, gly-nororipavine, glucosylated nororipavine, nor-opioids or glycosylated noropioids). It may also comprise one or more in vivo steps performed in another cell, such as a plant cell, for example a cell of Papaver somniferum. For example, thebaine and/or oripavine or precursors thereof may be produced in a plant, such as poppy (Papaver somniferum) and isolated therefrom and then fed to a cell culture of the invention for conversions ion into northebaine and/or nororipavine. Accordingly, in one embodiment the method of the invention further comprises feeding the cell culture with exogenous thebaine, oripavine and/or a precursor thereof, and even further where the exogenous thebaine, oripavine and/or precursor thereof is a plant extract.

[0414] Desired end products may be for example buprenorphine, naltrexone, naloxone, nalmefene or nalbuphine. Methods of producing glycosylated BIAs and glycosylated opioids (such as oripavine glycosides and/or nororipavine glycosides), genetically modified host cells producing such glycosides, cultures of those host cells, in addition to methods for cultivating such cultures into fermentation compositions and isolating produced oripavine glycosides and/or nororipavine glycosides therefrom in the formation of compositions comprising oripavine glycosides and/or nororipavine glycosides are all taught in PCT/EP2022/062130, the content of which is incorporated herein.

[0415] Currently known methods for producing semisynthetic opioids and BIAs (including oxycodone, hydrocodone, hydromorphone, oxymorphone, naloxone, naltrexone, nalmefene, methylnaltrexone, noroxymorphone, buprenorphine) include production via chemical synthesis from thebaine, oripavine, morphine and codeine, mostly commonly from thebaine or oripavine, all four compounds produced by extraction from the opium poppy (Papaver somniferum). The lack of a commercial supply of nororipavine is in part due to the inability of the opium poppy to produce commercially viable concentrations of nororipavine, which is believed to be due to the lack of a naturally occurring N-demethylase enzyme in the opium poppy. High yielding industrially applicable methods of synthesis of nororipavine have not previously been disclosed and production of commercially relevant quantities of nororipavine have not hitherto been available. Thebaine, oripavine, northebaine and/or in particular nororipavine are attractive for use as a starting material due to their chemical structure and functionality allowing efficient installation of the hydroxy group at C-14 position and/or for performing the Diels-Alder reaction on the methoxydiene moiety to produce the backbone of buprenorphine. Nororipavine produced by fermentation/bioconversion has the additional advantage over thebaine and oripavine that the difficult chemical N-demethylation is already completed further enhancing the utility as a starting material for buprenorphine or “NaIs” synthesis. (Machara et. al. Georg Thieme Verlag Stuttgart. New York-Synthesis 2016, 48, 1803-1813).

[0416] Separation methods for opiates and other alkaloids are well-known in the art. See, for example PCT/EP2020/078496, for methods of isolation of deglucosylated glycosylated nor-opiates.

[0417] In some aspects of the current invention, the recovered and/or isolated BIA, BIA-glycoside, oripavine or glycosylated oripavine or glucosylated oripavine, thebaine, northebaine, nororipavine, glycosylated nororipavine or glucosylated nororipavine produced by recombinant microbial host cells according to the current invention, is converted chemically and/or biochemically into bis-benzyl nororipavine, nalbuphine, morphine, hydromorphone, codeine, hydrocodone, oxycodone, oxymorphone noroxymorphone, noroxymorphinone, buprenorphine, naloxone, naltrexone, or nalmefene. Such methods of conversion are already familiar to those skilled in the art and applicable regardless of the source of BIA or BIA derivative used, non-limiting examples of which are taught in Carroll et al. 2009, Dasgupta et al. 2020, Fossati et al. 2015, Galanie et al. 2015, Hudlicky et al. 2015, WO2018211331 and WO 2021/144362, which are incorporated herein by reference.

### Fermentation Composition

[0418] The invention further provides a fermentation composition comprising the cell culture of the invention and the benzylisoquinoline alkaloid comprised therein.

[0419] In one embodiment at least 10%, 25%, 50%, such as at least 75%, such as at least 95%, such as at least 99% of the cells of the fermentation composition of the invention are lysed. Further in the fermentation composition of the invention at least 10%, 25%, 50%, such as at least 75%, such as at least 95%, such as at least 99% of solid cellular material may have been removed and separated from a liquid phase. Moreover, in addition to benzylisoquinoline alkaloid the fermentation composition of the invention may comprise one or more compounds selected from trace metals, vitamins, salts, yeast nitrogen base, carbon source, YNB, and/or amino acids of the fermentation. In particular the fermentation compositing of the invention comprise a concentration of benzylisoquinoline alkaloid is at least 1 mg/kg composition, such as at least 5 mg/kg, such as at least 10 mg/kg, such as at least 20 mg/kg, such as at least 50 mg/kg, such as at least 100 mg/kg, such as at least 500 mg/kg, such as at least 1000 mg/kg, such as at least 5000 mg/kg, such as at least 10000 mg/kg, such as at least 50000 mg/kg.

### Compositions and Use

[0420] In a further aspect the invention provides a composition comprising the fermentation composition of the invention (comprising one or more opiate or benzylisoquinoline alkaloid, such as any BIA, BIA-glycoside, oripavine, glucosylated oripavine, gly-oripavine, thebaine, northebaine, nororipavine, gly-nororipavine, glucosylated nororipavine, nor-opioids or glycosylated noropioids) and one or more carriers, agents, additives and/or excipients. Carriers, agents, additives and/or excipients includes formulation additives, stabilising agent, fillers and the like. The composition may be formulated into a dry solid form by using methods known in the art, such as spray drying, spray cooling, lyophilization, flash freezing, granulation, microgranulation, encapsulation or microencapsulation. The composition may also be formulated into liquid stabilized form using methods known in the art, such as formulation into a stabilized liquid comprising one or more stabilizers such as sugars and/or polyols (e.g. sugar alcohols) and/or organic acids (e.g. lactic acid).

[0421] Still further the invention provides a pharmaceutical composition comprising the fermentation composition of the invention preceding item and one or more pharmaceutical grade excipient, additives and/or adjuvants. The pharmaceutical composition can be in form of a powder, tablet or capsule, or it can be liquid in the form of a pharmaceutical solution, suspension, lotion or ointment. The pharmaceutical composition can also be incorporated into suitable delivery systems such as for buccal administration or as a patch for transdermal administration.

[0422] The invention further provides a method for preparing the pharmaceutical composition of the invention comprising mixing the fermentation composition of the invention with one or more pharmaceutical grade excipient, additives and/or adjuvants.

[0423] The pharmaceutical composition is suitably used as a medicament in a method for treating and/or relieving a disease and/or medical condition, in particular in a mammal. Accordingly, the invention further provides a method for preventing, treating and/or relieving a disease and/or medical condition comprising administering a therapeutically effective amount of the pharmaceutical composition of the invention to a mammal in need of treatment and/or relief. Diseases and/or medical conditions treatable or relievable by the pharmaceutical composition includes but is not limited to pain, opiate poisoning conditions, opioid use disorder, alcohol use disorder and/or other conditions. Appropriate and effective dosages of benzylisoquinoline alkaloids are known in the art. The pharmaceutical preparation can be administered parenterally, such as topically, epicutaneously, sublingually, buccally, nasally, intradermally, intralesionally, (intra) ocularly, intravenously, intramuscular, intrapulmonary and/or intravaginally. The pharmaceutical composition can also be administered enterally to the gastrointestinal tract.

### Sequences

[0424] The present application contains a Sequence Listing prepared in Patent In ver 3.5 submitted electronically in ST26 format which is hereby incorporated by reference in its entirety. The “SEQ ID NO:” in Table 1 are the numbers used herein. When the terms “Artificial” is used in Table with reference to a nucleic acid sequence, this refers to a nucleic acid sequence that has been codon optimized and/or contains mutations. The following sequences are included:

TABLE 1

| | | | | | |
|---|---|---|---|---|---|
| SEQ ID | Amino acid | DAHP | Aro4fbr | From | Artificial |
| NO: 1 | sequence of | | | | |
| SEQ ID | DNA coding | DAHP | Aro4fbr | From | Artificial |
| NO: 2 | sequence of | | | | |
| SEQ ID | Amino acid | chorismate | ARO7fbr | From | Artificial |
| NO: 3 | sequence of | mutase | | | |
| SEQ ID | DNA coding | chorismate | ARO7fbr | From | Artificial |
| NO: 4 | sequence of | mutase | | | |
| SEQ ID | Amino acid | Tyr1 | Tyr1 | From | S. cerevisiae |
| NO: 5 | sequence of | | | | |
| SEQ ID | DNA coding | Tyr1 | Tyr1 | From | S. cerevisiae |
| NO: 6 | sequence of | | | | |
| SEQ ID | Amino acid | TH | SoCYP76ADr9 | From | Spinacia oleracea |
| NO: 7 | sequence of | | | | |
| SEQ ID | DNA coding | TH | SoCYP76ADr9 | From | Spinacia oleracea |
| NO: 8 | sequence of | | | | |
| SEQ ID | Amino acid | TH | OfCYP76ADr12 | From | Opuntia ficus-indica |
| NO: 9 | sequence of | | | | |
| SEQ ID | DNA coding | TH | OfCYP76ADr12 | From | Opuntia ficus-indica |
| NO: 10 | sequence of | | | | |
| SEQ ID | Amino acid | TH | FICYP76ADr11 | From | Froelichia latifolia |
| NO: 11 | sequence of | | | | |
| SEQ ID | DNA coding | TH | FICYP76ADr11 | From | Froelichia latifolia |
| NO: 12 | sequence of | | | | |
| SEQ ID | Amino acid | TH | BvCYP76ADr10 | From | Beta vulgaris |
| NO: 13 | sequence of | | | | |
| SEQ ID | DNA coding | TH | BvCYP76ADr10 | From | Beta vulgaris |
| NO: 14 | sequence of | | | | |
| SEQ ID | Amino acid | TH | AnCYP76ADr17 | From | Abronia nealleyi |
| NO: 15 | sequence of | | | | |
| SEQ ID | DNA coding | TH | AnCYP76ADr17 | From | Abronia nealleyi |
| NO: 16 | sequence of | | | | |
| SEQ ID | Amino acid | TH | BvCYP76ADr8 | From | Beta vulgaris |
| NO: 17 | sequence of | | | | |
| SEQ ID | DNA coding | TH | BvCYP76ADr8 | From | Beta vulgaris |
| NO: 18 | sequence of | | | | |
| SEQ ID | Amino acid | TH | BvCYP76Ar7 | From | Beta vulgaris |
| NO: 19 | sequence of | | | | |
| SEQ ID | DNA coding | TH | BvCYP76Ar7 | From | Beta vulgaris |
| NO: 20 | sequence of | | | | |
| SEQ ID | Amino acid | TH | BvCYP76ADr6 | From | Beta vulgaris |
| NO: 21 | sequence of | | | | |
| SEQ ID | DNA coding | TH | BvCYP76ADr6 | From | Beta vulgaris |
| NO: 22 | sequence of | | | | |
| SEQ ID | Amino acid | TH | CbCYP76ADr28 | From | Cleretum |
| NO: 23 | sequence of | | | | bellidiforme |
| SEQ ID | DNA coding | TH | CbCYP76ADr28 | From | Cleretum |
| NO: 24 | sequence of | | | | bellidiforme |
| SEQ ID | Amino acid | TH | EvCYP76ADr20 | From | Ercilla volubilis |
| NO: 25 | sequence of | | | | |
| SEQ ID | DNA coding | TH | EvCYP76ADr20 | From | Ercilla volubilis |
| NO: 26 | sequence of | | | | |
| SEQ ID | Amino acid | TH | PdCYP76ADr21 | From | Phytolacca dioica |
| NO: 27 | sequence of | | | | |
| SEQ ID | DNA coding | TH | PdCYP76ADr21 | From | Phytolacca dioica |
| NO: 28 | sequence of | | | | |
| SEQ ID | Amino acid | TH | AoCYP76ADr16 | From | Acleisanthes |
| NO: 29 | sequence of | | | | obtuse |
| SEQ ID | DNA coding | TH | AoCYP76ADr16 | From | Acleisanthes |
| NO: 30 | sequence of | | | | obtuse |
| SEQ ID | Amino acid | TH | MmCYP76ADr18 | From | Mirabilis multiflora |
| NO: 31 | sequence of | | | | |
| SEQ ID | DNA coding | TH | MmCYP76ADr18 | From | Mirabilis multiflora |
| NO: 32 | sequence of | | | | |
| SEQ ID | Amino acid | TH | AoCYP76ADr24 | From | Acleisanthes |
| NO: 33 | sequence of | | | | obtuse |
| SEQ ID | DNA coding | TH | AoCYP76ADr24 | From | Acleisanthes |
| NO: 34 | sequence of | | | | obtuse |
| SEQ ID | Amino acid | TH | AnCYP76ADr27 | From | Abronia nealleyi |
| NO: 35 | sequence of | | | | |
| SEQ ID | DNA coding | TH | AnCYP76ADr27 | From | Abronia nealleyi |
| NO: 36 | sequence of | | | | |
| SEQ ID | Amino acid | TH | PaCYP76ADr19 | From | Phytolacca |
| NO: 37 | sequence of | | | | americana |
| SEQ ID | DNA coding | TH | PaCYP76ADr19 | From | Phytolacca |
| NO: 38 | sequence of | | | | americana |
| SEQ ID | Amino acid | TH | CqCYP76ADr5 | From | Chenopodium |
| NO: 39 | sequence of | | | | quinoa |
| SEQ ID | DNA coding | TH | CqCYP76ADr5 | From | Chenopodium |
| NO: 40 | sequence of | | | | quinoa |
| SEQ ID | Amino acid | TH | MmCYP76ADr22 | From | Mirabilis multiflora |
| NO: 41 | sequence of | | | | |
| SEQ ID | DNA coding | TH | MmCYP76ADr22 | From | Mirabilis multiflora |
| NO: 42 | sequence of | | | | |
| SEQ ID | Amino acid | TH | CqCYP76ADr4 | From | Chenopodium |
| NO: 43 | sequence of | | | | quinoa |
| SEQ ID | DNA coding | TH | CqCYP76ADr4 | From | Chenopodium |
| NO: 44 | sequence of | | | | quinoa |
| SEQ ID | Amino acid | TH | PaCYP76ADr14 | From | Phytolacca |
| NO: 45 | sequence of | | | | americana |
| SEQ ID | DNA coding | TH | PaCYP76ADr14 | From | Phytolacca |
| NO: 46 | sequence of | | | | americana |
| SEQ ID | Amino acid | TH | AnCYP76ADr23 | From | Abronia nealleyi |
| NO: 47 | sequence of | | | | |
| SEQ ID | DNA coding | TH | AnCYP76ADr23 | From | Abronia nealleyi |
| NO: 48 | sequence of | | | | |
| SEQ ID | Amino acid | TH | SoCYP76ADr2 | From | Spinacia oleracea |
| NO: 49 | sequence of | | | | |
| SEQ ID | DNA coding | TH | SoCYP76ADr2 | From | Spinacia oleracea |
| NO: 50 | sequence of | | | | |
| SEQ ID | Amino acid | TH | SoCYP76ADr3 | From | Spinacia oleracea |
| NO: 51 | sequence of | | | | |
| SEQ ID | DNA coding | TH | SoCYP76ADr3 | From | Spinacia oleracea |
| NO: 52 | sequence of | | | | |
| SEQ ID | Amino acid | TH | SoCYP76ADr1 | From | Spinacia oleracea |
| NO: 53 | sequence of | | | | |
| SEQ ID | DNA coding | TH | SoCYP76ADr1 | From | Spinacia oleracea |
| NO: 54 | sequence of | | | | |
| SEQ ID | Amino acid | TH | CqCYP76ADr13 | From | Chenopodium |
| NO: 55 | sequence of | | | | quinoa |
| SEQ ID | DNA coding | TH | CqCYP76ADr13 | From | Chenopodium |
| NO: 56 | sequence of | | | | quinoa |
| SEQ ID | Amino acid | TH | SoCYP76ADr15 | From | Spinacia oleracea |
| NO: 57 | sequence of | | | | |
| SEQ ID | DNA coding | TH | SoCYP76ADr15 | From | Spinacia oleracea |
| NO: 58 | sequence of | | | | |
| SEQ ID | Amino acid | TH | MjCYP76ADr26 | From | Mirabilis jalapa |
| NO: 59 | sequence of | | | | |
| SEQ ID | DNA coding | TH | MjCYP76ADr26 | From | Mirabilis jalapa |
| NO: 60 | sequence of | | | | |
| SEQ ID | Amino acid | TH | MmCYP76ADr25 | From | Mirabilis multiflora |
| NO: 61 | sequence of | | | | |
| SEQ ID | DNA coding | TH | MmCYP76ADr25 | From | Mirabilis multiflora |
| NO: 62 | sequence of | | | | |
| SEQ ID | Amino acid | TH | BvCYP76AD1VM | From | Beta vulgaris |
| NO: 63 | sequence of | | | | |
| SEQ ID | DNA coding | TH | BvCYP76AD1VM | From | Beta vulgaris |
| NO: 64 | sequence of | | | | |
| SEQ ID | Amino acid | TH | CYP76AD1_2mut | From | Artificial |
| NO: 65 | sequence of | | | | |
| SEQ ID | DNA coding | TH | CYP76AD1_2mut | From | Artificial |
| NO: 66 | sequence of | | | | |
| SEQ ID | Amino acid | CPR′′′ | BvCPR1 | From | Beta vulgaris |
| NO: 67 | sequence of | | | | |
| SEQ ID | DNA coding | CPR′′′ | BvCPR1 | From | Beta vulgaris |
| NO: 68 | sequence of | | | | |
| SEQ ID | Amino acid | DoDC | PpDoDC | From | Pseudomonas |
| NO: 69 | sequence of | | | | putida |
| SEQ ID | DNA coding | DoDC | PpDoDC | From | Pseudomonas |
| NO: 70 | sequence of | | | | putida |
| SEQ ID | Amino acid | DoDC | PpDoDC | From | Pseudomonas |
| NO: 71 | sequence of | | | | putida |
| SEQ ID | DNA coding | DoDC | PpDoDC | From | Pseudomonas |
| NO: 72 | sequence of | | | | putida |
| SEQ ID | Amino acid | NCS | d19CjNCS | From | Coptis japonica |
| NO: 73 | sequence of | | | | |
| SEQ ID | DNA coding | NCS | d19CjNCS | From | Coptis japonica |
| NO: 74 | sequence of | | | | |
| SEQ ID | DNA coding | NCS | d19CjNCS | From | Coptis japonica |
| NO: 75 | sequence of | | | | |
| SEQ ID | Amino acid | NCS | HDEL_CjNCS_V152 | From | Artificial |
| NO: 76 | sequence of | | | | |
| SEQ ID | DNA coding | NCS | HDEL_CjNCS_V152 | From | Artificial |
| NO: 77 | sequence of | | | | |
| SEQ ID | DNA coding | Integration | pRIV40 | From | Artificial |
| NO: 78 | sequence of | plasmid | | | |
| SEQ ID | Amino acid | 6-OMT | Ps6OMT_Q6WUC1 | From | Papaver |
| NO: 79 | sequence of | | | | somniferum |
| SEQ ID | DNA coding | 6-OMT | Ps6OMT_Q6WUC1 | From | Papaver |
| NO: 80 | sequence of | | | | somniferum |
| SEQ ID | Amino acid | 6-OMT | — | From | Papaver |
| NO: 81 | sequence of | | | | somniferum |
| SEQ ID | Amino acid | CNMT | CjCNMT | From | Coptis japonica |
| NO: 82 | sequence of | | | | |
| SEQ ID | DNA coding | CNMT | CjCNMT | From | Coptis japonica |
| NO: 83 | sequence of | | | | |
| SEQ ID | Amino acid | CNMT | — | From | Papaver |
| NO: 84 | sequence of | | | | somniferum |
| SEQ ID | Amino acid | NMCH | EcNMCH | From | Eschscholzia |
| NO: 85 | sequence of | | | | californica |
| SEQ ID | DNA coding | NMCH | EcNMCH | From | Eschscholzia |
| NO: 86 | sequence of | | | | californica |
| SEQ ID | Amino acid | NMCH | — | From | Eschscholzia |
| NO: 87 | sequence of | | | | californica |
| SEQ ID | DNA coding | NMCH | — | From | Eschscholzia |
| NO: 88 | sequence of | | | | californica |
| SEQ ID | Amino acid | 4′-OMT | Cj4OMT | From | Coptis japonica |
| NO: 89 | sequence of | | | | |
| SEQ ID | DNA coding | 4′-OMT | Cj4OMT | From | Coptis japonica |
| NO: 90 | sequence of | | | | |
| SEQ ID | Amino acid | 4′-OMT | — | From | Papaver |
| NO: 91 | sequence of | | | | somniferum |
| SEQ ID | Amino acid | STORR | DRS-DRR | From | Papaver |
| NO: 92 | sequence of | | | | bracteatum |
| SEQ ID | DNA coding | STORR | DRS-DRR | From | Papaver |
| NO: 93 | sequence of | | | | bracteatum |
| SEQ ID | Amino acid | STORR | StlRED | From | Streptomyces |
| NO: 94 | sequence of | | | | tsukubaensis |
| SEQ ID | DNA coding | STORR | StlRED | From | Streptomyces |
| NO: 95 | sequence of | | | | tsukubaensis |
| SEQ ID | Amino acid | STORR | PsSTORR | From | Papaver |
| NO: 96 | sequence of | | | | somniferum |
| SEQ ID | DNA coding | STORR | PsSTORR | From | Papaver |
| NO: 97 | sequence of | | | | somniferum |
| SEQ ID | Amino acid | STORR | PsCYP82Y2 | From | Papaver |
| NO: 98 | sequence of | P450 | | | somniferum |
| SEQ ID | DNA coding | STORR | PsCYP82Y2 | From | Papaver |
| NO: 99 | sequence of | P450 | | | somniferum |
| SEQ ID | Amino acid | STORR | PrCYP82Y2-like | From | Papaver rhoeas |
| NO: 100 | sequence of | P450 | | | |
| SEQ ID | DNA coding | STORR | PrCYP82Y2-like | From | Papaver rhoeas |
| NO: 101 | sequence of | P450 | | | |
| SEQ ID | Amino acid | STORR | proID60 | From | Artificial |
| NO: 102 | sequence of | P450 | | | |
| SEQ ID | DNA coding | STORR | proID60 | From | Artificial |
| NO: 103 | sequence of | P450 | | | |
| SEQ ID | Amino acid | STORR | proID66 | From | Artificial |
| NO: 104 | sequence of | P450 | | | |
| SEQ ID | DNA coding | STORR | proID66 | From | Artificial |
| NO: 105 | sequence of | P450 | | | |
| SEQ ID | Amino acid | STORR | proID79 | From | Artificial |
| NO: 106 | sequence of | P450 | | | |
| SEQ ID | DNA coding | STORR | proID79 | From | Artificial |
| NO: 107 | sequence of | P450 | | | |
| SEQ ID | Amino acid | STORR | PsAKR | From | Papaver |
| NO: 108 | sequence of | Reductase | | | somniferum |
| SEQ ID | DNA coding | STORR | PsAKR | From | Papaver |
| NO: 109 | sequence of | Reductase | | | somniferum |
| SEQ ID | Amino acid | STORR | PrAKR | From | Papaver rhoeas |
| NO: 110 | sequence of | Reductase | | | |
| SEQ ID | DNA coding | STORR | PrAKR | From | Papaver rhoeas |
| NO: 111 | sequence of | Reductase | | | |
| SEQ ID | Amino acid | CPR″ | PsCPR | From | Papaver |
| NO: 112 | sequence of | | | | somniferum |
| SEQ ID | DNA coding | CPR″ | PsCPR | From | Papaver |
| NO: 113 | sequence of | | | | somniferum |
| SEQ ID | Amino acid | CPR″ | AtATR1 | From | Arabidopsis |
| NO: 114 | sequence of | | | | thaliana |
| SEQ ID | DNA coding | CPR″ | AtATR1 | From | Arabidopsis |
| NO: 115 | sequence of | | | | thaliana |
| SEQ ID | Amino acid | SAS | PbSAS | From | Papaver |
| NO: 116 | sequence of | | | | bracteatum |
| SEQ ID | DNA coding | SAS | PbSAS | From | Papaver |
| NO: 117 | sequence of | | | | bracteatum |
| SEQ ID | Amino acid | SAS | — | From | Papaver |
| NO: 118 | sequence of | | | | bracteatum |
| SEQ ID | DNA coding | SAS | — | From | Papaver |
| NO: 119 | sequence of | | | | bracteatum |
| SEQ ID | Amino acid | SAR | pbSalR | From | Papaver |
| NO: 120 | sequence of | | | | bracteatum |
| SEQ ID | DNA coding | SAR | pbSalR | From | Papaver |
| NO: 121 | sequence of | | | | bracteatum |
| SEQ ID | Amino acid | SAR | — | From | Papaver |
| NO: 122 | sequence of | | | | bracteatum |
| SEQ ID | Amino acid | SAT | PsSAT | From | Papaver |
| NO: 123 | sequence of | | | | somniferum |
| SEQ ID | DNA coding | SAT | PsSAT | From | Papaver |
| NO: 124 | sequence of | | | | somniferum |
| SEQ ID | Amino acid | SAT | — | From | Papaver |
| NO: 125 | sequence of | | | | somniferum |
| SEQ ID | Amino acid | THS | HA BetV1M | From | Papaver |
| NO: 126 | sequence of | | | | somniferum |
| SEQ ID | Amino acid | THS | BETV1L HA | From | Papaver |
| NO: 127 | sequence of | | | | somniferum |
| SEQ ID | Amino acid | THS | — | From | Papaver |
| NO: 128 | sequence of | | | | somniferum |
| SEQ ID | Amino acid | THS | PsTHS1 | From | Papaver |
| NO: 129 | sequence of | | | | somniferum |
| SEQ ID | DNA coding | THS | PsTHS1 | From | Papaver |
| NO: 130 | sequence of | | | | somniferum |
| SEQ ID | Amino acid | THS | PsTHS2 | From | Papaver |
| NO: 131 | sequence of | | | | somniferum |
| SEQ ID | DNA coding | THS | PsTHS2 | From | Papaver |
| NO: 132 | sequence of | | | | somniferum |
| SEQ ID | Amino acid | THS | — | From | Papaver |
| NO: 133 | sequence of | | | | somniferum |
| SEQ ID | Amino acid | THS | PROths2_138 | From | Artificial |
| NO: 134 | sequence of | | | | |
| SEQ ID | DNA coding | THS | PROths2_138 | From | Artificial |
| NO: 135 | sequence of | | | | |
| SEQ ID | Amino acid | THS | PROths2_143 | From | Artificial |
| NO: 136 | sequence of | | | | |
| SEQ ID | DNA coding | THS | PROths2_143 | From | Artificial |
| NO: 137 | sequence of | | | | |
| SEQ ID | Amino acid | THS | PROths2_116 | From | Artificial |
| NO: 138 | sequence of | | | | |
| SEQ ID | DNA coding | THS | PROths2_116 | From | Artificial |
| NO: 139 | sequence of | | | | |
| SEQ ID | Amino acid | P450 | HaCYP6AE15v2 | From | Helicoverpa |
| NO: 140 | sequence of | | protein | | armigera |
| SEQ ID | DNA coding | P450 | HaCYP6AE15v2 | From | Helicoverpa |
| NO: 141 | sequence of | | *DNA | | armigera |
| SEQ ID | Amino acid | P450 | HaCYP6AE19 protein | From | Helicoverpa |
| NO: 142 | sequence of | | | | armigera |
| SEQ ID | DNA coding | P450 | HaCYP6AE19 *DNA | From | Helicoverpa |
| NO: 143 | sequence of | | | | armigera |
| SEQ ID | Amino acid | P450 | HaCYP6AE11 protein | From | Helicoverpa |
| NO: 144 | sequence of | | | | armigera |
| SEQ ID | DNA coding | P450 | HaCYP6AE11 *DNA | From | Helicoverpa |
| NO: 145 | sequence of | | | | armigera |
| SEQ ID | Amino acid | P450 | HaCYP6AE17 protein | From | Helicoverpa |
| NO: 146 | sequence of | | | | armigera |
| SEQ ID | DNA coding | P450 | HaCYP6AE17 *DNA | From | Helicoverpa |
| NO: 147 | sequence of | | | | armigera |
| SEQ ID | Amino acid | P450 | HaCYP6AE24 protein | From | Helicoverpa |
| NO: 148 | sequence of | | | | armigera |
| SEQ ID | DNA coding | P450 | HaCYP6AE24 *DNA | From | Helicoverpa |
| NO: 149 | sequence of | | | | armigera |
| SEQ ID | Amino acid | P450 | HaCYP6AE20v2 | From | Helicoverpa |
| NO: 150 | sequence of | | protein | | armigera |
| SEQ ID | DNA coding | P450 | HaCYP6AE20v2 | From | Helicoverpa |
| NO: 151 | sequence of | | *DNA | | armigera |
| SEQ ID | Amino acid | P450 | Hv_CYP_A0A2A4JAM9 | From | Heliothis virescens |
| NO: 152 | sequence of | | protein | | |
| SEQ ID | DNA coding | P450 | Hv_CYP_A0A2A4JAM9 | From | Heliothis virescens |
| NO: 153 | sequence of | | *DNA | | |
| SEQ ID | Amino acid | P450 | Hv_CYP_A0A2A4JAK3 | From | Heliothis virescens |
| NO: 154 | sequence of | | protein | | |
| SEQ ID | DNA coding | P450 | Hv_CYP_A0A2A4JAK3 | From | Heliothis virescens |
| NO: 155 | sequence of | | *DNA | | |
| SEQ ID | Amino acid | P450 | Se_CYP6AE68 | From | Spodoptera exigua |
| NO: 156 | sequence of | | protein | | |
| SEQ ID | DNA coding | P450 | Se_CYP6AE68 | From | Spodoptera exigua |
| NO: 157 | sequence of | | *DNA | | |
| SEQ ID | Amino acid | P450 | Hv_CYP_A0A2A4J7V4 | From | Heliothis virescens |
| NO: 158 | sequence of | | protein | | |
| SEQ ID | DNA coding | P450 | Hv_CYP_A0A2A4J7V4 | From | Heliothis virescens |
| NO: 159 | sequence of | | *DNA | | |
| SEQ ID | Amino acid | P450 | CmCYP6_A0A0C5CGV6 | From | Cnaphalocrocis |
| NO: 160 | sequence of | | protein | | medinalis |
| SEQ ID | DNA coding | P450 | CmCYP6_A0A0C5CGV6 | From | Cnaphalocrocis |
| NO: 161 | sequence of | | *DNA | | medinalis |
| SEQ ID | Amino acid | P450 | BmCYP6AE9_A9QW15 | From | Bombyx mandarina |
| NO: 162 | sequence of | | protein | | |
| SEQ ID | DNA coding | P450 | BmCYP6AE9_A9QW15 | From | Bombyx mandarina |
| NO: 163 | sequence of | | *DNA | | |
| SEQ ID | Amino acid | P450 | Bm_CYP6AE9 | From | Bombyx mori |
| NO: 164 | sequence of | | protein | | |
| SEQ ID | DNA coding | P450 | Bm_CYP6AE9 *DNA | From | Bombyx mori |
| NO: 165 | sequence of | | | | |
| SEQ ID | Amino acid | P450 | Se_CYP6AE10 | From | Spodoptera exigua |
| NO: 166 | sequence of | | protein | | |
| SEQ ID | DNA coding | P450 | Se_CYP6AE10 *DNA | From | Spodoptera exigua |
| NO: 167 | sequence of | | | | |
| SEQ ID | Amino acid | P450 | Sf_CYP_A0A2H1WID4 | From | Spodoptera |
| NO: 168 | sequence of | | protein | | frugiperda |
| SEQ ID | DNA coding | P450 | Sf_CYP_A0A2H1WID4 | From | Spodoptera |
| NO: 169 | sequence of | | *DNA | | frugiperda |
| SEQ ID | Amino acid | P450 | Sf_CYP_A0A2H1V0E7 | From | Spodoptera |
| NO: 170 | sequence of | | protein | | frugiperda |
| SEQ ID | DNA coding | P450 | Sf_CYP_A0A2H1V0E7 | From | Spodoptera |
| NO: 171 | sequence of | | *DNA | | frugiperda |
| SEQ ID | Amino acid | P450 | Ha_CYP6AE12 | From | Helicoverpa |
| NO: 172 | sequence of | | protein | | armigera |
| SEQ ID | DNA coding | P450 | Ha_CYP6AE12 *DNA | From | Helicoverpa |
| NO: 173 | sequence of | | | | armigera |
| SEQ ID | Amino acid | P450 | Sf_CYP6AE44 | From | Spodoptera |
| NO: 174 | sequence of | | protein | | frugiperda |
| SEQ ID | DNA coding | P450 | Sf_CYP6AE44 *DNA | From | Spodoptera |
| NO: 175 | sequence of | | | | frugiperda |
| SEQ ID | Amino acid | P450 | HaCYP6AE_A0A068F0X7 | From | Helicoverpa |
| NO: 176 | sequence of | | protein | | armigera |
| SEQ ID | DNA coding | P450 | HaCYP6AE_A0A068F0X7 | From | Helicoverpa |
| NO: 177 | sequence of | | *DNA | | armigera |
| SEQ ID | Amino acid | P450 | DpCYP_Q7YZS2 | From | Depressaria |
| NO: 178 | sequence of | | protein | | pastinacella |
| SEQ ID | DNA coding | P450 | DpCYP_Q7YZS2 | From | Depressaria |
| NO: 179 | sequence of | | *DNA | | pastinacella |
| SEQ ID | Amino acid | P450 | Sf_CYP_A0A2H1V0E7 | From | Spodoptera |
| NO: 180 | sequence of | | protein | | frugiperda |
| SEQ ID | DNA coding | P450 | Sf_CYP_A0A2H1V0E7 | From | Spodoptera |
| NO: 181 | sequence of | | *DNA | | frugiperda |
| SEQ ID | Amino acid | P450 | BmCYP6AE2_L0N7C5 | From | Bombyx mori |
| NO: 182 | sequence of | | protein | | |
| SEQ ID | DNA coding | P450 | BmCYP6AE2_L0N7C5 | From | Bombyx mori |
| NO: 183 | sequence of | | *DNA | | |
| SEQ ID | Amino acid | P450 | BmCYP_C1KJL7 | From | Bombyx mandarina |
| NO: 184 | sequence of | | protein | | |
| SEQ ID | DNA coding | P450 | BmCYP_C1KJL7 | From | Bombyx mandarina |
| NO: 185 | sequence of | | *DNA | | |
| SEQ ID | Amino acid | P450 | ZfCYP6AE27_D2JLK6 | From | Zygaena |
| NO: 186 | sequence of | | protein | | filipendulae |
| SEQ ID | DNA coding | P450 | ZfCYP6AE27_D2JLK6 | From | Zygaena |
| NO: 187 | sequence of | | *DNA | | filipendulae |
| SEQ ID | Amino acid | P450 | BmCyp6AE21_B6VFR9 | From | Bombyx mori |
| NO: 188 | sequence of | | protein | | |
| SEQ ID | DNA coding | P450 | BmCyp6AE21_B6VFR9 | From | Bombyx mori |
| NO: 189 | sequence of | | *DNA | | |
| SEQ ID | Amino acid | P450 | BmCYP6AE7_A4GUB8 | From | Bombyx mori |
| NO: 190 | sequence of | | protein | | |
| SEQ ID | DNA coding | P450 | BmCYP6AE7_A4GUB8 | From | Bombyx mori |
| NO: 191 | sequence of | | *DNA | | |
| SEQ ID | Amino acid | P450 | CmCYP6_A0A0C5C1l6 | From | Cnaphalocrocis |
| NO: 192 | sequence of | | protein | | medinalis |
| SEQ ID | DNA coding | P450 | CmCYP6_A0A0C5C1l6 | From | Cnaphalocrocis |
| NO: 193 | sequence of | | *DNA | | medinalis |
| SEQ ID | Amino acid | P450 | SeCYP6_A0A248QEH8 | From | Spodoptera exigua |
| NO: 194 | sequence of | | protein | | |
| SEQ ID | DNA coding | P450 | SeCYP6_A0A248QEH8 | From | Spodoptera exigua |
| NO: 195 | sequence of | | *DNA | | |
| SEQ ID | Amino acid | P450 | BmCYP6AE9_A5HKM1 | From | Bombyx mori |
| NO: 196 | sequence of | | protein | | |
| SEQ ID | DNA coding | P450 | BmCYP6AE9_A5HKM1 | From | Bombyx mori |
| NO: 197 | sequence of | | *DNA | | |
| SEQ ID | Amino acid | P450 | CYPDN_39 protein | From | Rhizopus |
| NO: 198 | sequence of | | | | microsporus |
| SEQ ID | DNA coding | P450 | CYPDN_39 gene | From | Rhizopus |
| NO: 199 | sequence of | | | | microsporus |
| SEQ ID | Amino acid | P450 | CYPDN_41 protein | From | Rhizopus |
| NO: 200 | sequence of | | | | microsporus |
| SEQ ID | DNA coding | P450 | CYPDN_41 gene | From | Rhizopus |
| NO: 201 | sequence of | | | | microsporus |
| SEQ ID | Amino acid | P450 | CYPDN_43 protein | From | Lichtheimia |
| NO: 202 | sequence of | | | | corymbifera |
| SEQ ID | DNA coding | P450 | CYPDN_43 gene | From | Lichtheimia |
| NO: 203 | sequence of | | | | corymbifera |
| SEQ ID | Amino acid | P450 | CYPDN_44 protein | From | Lichtheimia ramosa |
| NO: 204 | sequence of | | | | |
| SEQ ID | DNA coding | P450 | CYPDN_44 gene | From | Lichtheimia ramosa |
| NO: 205 | sequence of | | | | |
| SEQ ID | Amino acid | P450 | CYPDN_45 protein | From | Rhizopus |
| NO: 206 | sequence of | | | | microsporus |
| SEQ ID | DNA coding | P450 | CYPDN_45 gene | From | Rhizopus |
| NO: 207 | sequence of | | | | microsporus |
| SEQ ID | Amino acid | P450 | CYPDN_50 protein | From | Lichtheimia ramosa |
| NO: 208 | sequence of | | | | |
| SEQ ID | DNA coding | P450 | CYPDN_50 gene | From | Lichtheimia ramosa |
| NO: 209 | sequence of | | | | |
| SEQ ID | Amino acid | P450 | CYPDN_51 protein | From | Lichtheimia ramosa |
| NO: 210 | sequence of | | | | |
| SEQ ID | DNA coding | P450 | CYPDN_51 gene | From | Lichtheimia ramosa |
| NO: 211 | sequence of | | | | |
| SEQ ID | Amino acid | P450 | CYPDN_57 protein | From | Syncephalastrum |
| NO: 212 | sequence of | | | | racemosum |
| SEQ ID | DNA coding | P450 | CYPDN_57 gene | From | Syncephalastrum |
| NO: 213 | sequence of | | | | racemosum |
| SEQ ID | Amino acid | P450 | CYPDN_59 protein | From | Cunninghamella |
| NO: 214 | sequence of | | | | echinulata |
| SEQ ID | DNA coding | P450 | CYPDN_59 gene | From | Cunninghamella |
| NO: 215 | sequence of | | | | echinulata |
| SEQ ID | Amino acid | P450 | CYPDN_61 protein | From | Rhizopus |
| NO: 216 | sequence of | | | | azygosporus |
| SEQ ID | DNA coding | P450 | CYPDN_61 gene | From | Rhizopus |
| NO: 217 | sequence of | | | | azygosporus |
| SEQ ID | Amino acid | P450 | CYPDN_62 protein | From | Rhizopus |
| NO: 218 | sequence of | | | | azygosporus |
| SEQ ID | DNA coding | P450 | CYPDN_62 gene | From | Rhizopus |
| NO: 219 | sequence of | | | | azygosporus |
| SEQ ID | Amino acid | P450 | CYPDN_63 protein | From | Rhizopus |
| NO: 220 | sequence of | | | | microsporus |
| SEQ ID | DNA coding | P450 | CYPDN_63 gene | From | Rhizopus |
| NO: 221 | sequence of | | | | microsporus |
| SEQ ID | Amino acid | P450 | CYPDN_64 protein | From | Mucor circinelloides |
| NO: 222 | sequence of | | | | f. circinelloides |
| SEQ ID | DNA coding | P450 | CYPDN_64 gene | From | Mucor circinelloides |
| NO: 223 | sequence of | | | | f. circinelloides |
| SEQ ID | Amino acid | P450 | CYPDN_65 protein | From | Mucor ambiguus |
| NO: 224 | sequence of | | | | |
| SEQ ID | DNA coding | P450 | CYPDN_65 gene | From | Mucor ambiguus |
| NO: 225 | sequence of | | | | |
| SEQ ID | Amino acid | P450 | CYPDN_67 protein | From | Syncephalastrum |
| NO: 226 | sequence of | | | | racemosum |
| SEQ ID | DNA coding | P450 | CYPDN_67 gene | From | Syncephalastrum |
| NO: 227 | sequence of | | | | racemosum |
| SEQ ID | Amino acid | P450 | CYPDN_68 protein | From | Parasitella |
| NO: 228 | sequence of | | | | parasitica |
| SEQ ID | DNA coding | P450 | CYPDN_68 gene | From | Parasitella |
| NO: 229 | sequence of | | | | parasitica |
| SEQ ID | Amino acid | P450 | CYPDN_69 protein | From | Syncephalastrum |
| NO: 230 | sequence of | | | | racemosum |
| SEQ ID | DNA coding | P450 | CYPDN_69 gene | From | Syncephalastrum |
| NO: 231 | sequence of | | | | racemosum |
| SEQ ID | Amino acid | P450 | CYPDN_70 protein | From | Lichtheimia ramosa |
| NO: 232 | sequence of | | | | |
| SEQ ID | DNA coding | P450 | CYPDN_70 gene | From | Lichtheimia ramosa |
| NO: 233 | sequence of | | | | |
| SEQ ID | Amino acid | P450 | CYPDN_74 protein | From | Lichtheimia |
| NO: 234 | sequence of | | | | corymbifera |
| SEQ ID | DNA coding | P450 | CYPDN_74 gene | From | Lichtheimia |
| NO: 235 | sequence of | | | | corymbifera |
| SEQ ID | Amino acid | P450 | CYPDN_75 protein | From | Absidia repens |
| NO: 236 | sequence of | | | | |
| SEQ ID | DNA coding | P450 | CYPDN_75 gene | From | Absidia repens |
| NO: 237 | sequence of | | | | |
| SEQ ID | Amino acid | P450 | CYPDN_77 protein | From | Lichtheimia |
| NO: 238 | sequence of | | | | corymbifera |
| SEQ ID | DNA coding | P450 | CYPDN_77 gene | From | Lichtheimia |
| NO: 239 | sequence of | | | | corymbifera |
| SEQ ID | Amino acid | P450 | CYPDN_80 protein | From | Absidia glauca |
| NO: 240 | sequence of | | | | |
| SEQ ID | DNA coding | P450 | CYPDN_80 gene | From | Absidia glauca |
| NO: 241 | sequence of | | | | |
| SEQ ID | Amino acid | P450 | CYPDN_82 protein | From | Choanephora |
| NO: 242 | sequence of | | | | cucurbitarum |
| SEQ ID | DNA coding | P450 | CYPDN_82 gene | From | Choanephora |
| NO: 243 | sequence of | | | | cucurbitarum |
| SEQ ID | Amino acid | P450 | CYPDN_84 protein | From | Absidia glauca |
| NO: 244 | sequence of | | | | |
| SEQ ID | DNA coding | P450 | CYPDN_84 gene | From | Absidia glauca |
| NO: 245 | sequence of | | | | |
| SEQ ID | Amino acid | P450 | CYPDN_85 protein | From | Absidia repens |
| NO: 246 | sequence of | | | | |
| SEQ ID | DNA coding | P450 | CYPDN_85 gene | From | Absidia repens |
| NO: 247 | sequence of | | | | |
| SEQ ID | Amino acid | P450 | CYPDN_86 protein | From | Absidia repens |
| NO: 248 | sequence of | | | | |
| SEQ ID | DNA coding | P450 | CYPDN_86 gene | From | Absidia repens |
| NO: 249 | sequence of | | | | |
| SEQ ID | Amino acid | P450 | CYPDN_91 protein | From | Rhizopus |
| NO: 250 | sequence of | | | | microsporus |
| SEQ ID | DNA coding | P450 | CYPDN_91 gene | From | Rhizopus |
| NO: 251 | sequence of | | | | microsporus |
| SEQ ID | Amino acid | P450 | CYPDN_92 protein | From | Rhizopus |
| NO: 252 | sequence of | | | | azygosporus |
| SEQ ID | DNA coding | P450 | CYPDN_92 gene | From | Rhizopus |
| NO: 253 | sequence of | | | | azygosporus |
| SEQ ID | Amino acid | P450 | CYPDN_93 protein | From | Rhizopus |
| NO: 254 | sequence of | | | | azygosporus |
| SEQ ID | DNA coding | P450 | CYPDN_93 gene | From | Rhizopus |
| NO: 255 | sequence of | | | | azygosporus |
| SEQ ID | Amino acid | P450 | CYPDN_95 protein | From | Bifiguratus |
| NO: 256 | sequence of | | | | adelaidae |
| SEQ ID | DNA coding | P450 | CYPDN_95 gene | From | Bifiguratus |
| NO: 257 | sequence of | | | | adelaidae |
| SEQ ID | Amino acid | P450 | CYPDN_98 protein | From | Rhizopus stolonifer |
| NO: 258 | sequence of | | | | |
| SEQ ID | DNA coding | P450 | CYPDN_98 gene | From | Rhizopus stolonifer |
| NO: 259 | sequence of | | | | |
| SEQ ID | Amino acid | P450 | CYPDN_100 protein | From | Rhizopus oryzae |
| NO: 260 | sequence of | | | | |
| SEQ ID | DNA coding | P450 | CYPDN_100 gene | From | Rhizopus oryzae |
| NO: 261 | sequence of | | | | |
| SEQ ID | Amino acid | P450 | CYPDN_101 protein | From | Rhizopus |
| NO: 262 | sequence of | | | | microsporus |
| SEQ ID | DNA coding | P450 | CYPDN_101 gene | From | Rhizopus |
| NO: 263 | sequence of | | | | microsporus |
| SEQ ID | Amino acid | P450 | CYPDN_103 protein | From | Rhizopus delemar |
| NO: 264 | sequence of | | | | RA 99-880 |
| SEQ ID | DNA coding | P450 | CYPDN_103 gene | From | Rhizopus delemar |
| NO: 265 | sequence of | | | | RA 99-880 |
| SEQ ID | Amino acid | P450 | CYPDN_104 protein | From | Rhizopus stolonifer |
| NO: 266 | sequence of | | | | |
| SEQ ID | DNA coding | P450 | CYPDN_104 gene | From | Rhizopus stolonifer |
| NO: 267 | sequence of | | | | |
| SEQ ID | Amino acid | P450 | CYPDN_105 protein | From | Rhizopus |
| NO: 268 | sequence of | | | | azygosporus |
| SEQ ID | DNA coding | P450 | CYPDN_105 gene | From | Rhizopus |
| NO: 269 | sequence of | | | | azygosporus |
| SEQ ID | Amino acid | P450 | CYPDN_108 protein | From | Mucor circinelloides |
| NO: 270 | sequence of | | | | f. circinelloides |
| SEQ ID | DNA coding | P450 | CYPDN_108 gene | From | Mucor circinelloides |
| NO: 271 | sequence of | | | | f. circinelloides |
| SEQ ID | Amino acid | P450 | CYPDN_109 protein | From | Mucor circinelloides |
| NO: 272 | sequence of | | | | f. circinelloides |
| SEQ ID | DNA coding | P450 | CYPDN_109 gene | From | Mucor circinelloides |
| NO: 273 | sequence of | | | | f. circinelloides |
| SEQ ID | Amino acid | P450 | CYPDN_110 protein | From | Mucor circinelloides |
| NO: 274 | sequence of | | | | f. lusitanicus |
| SEQ ID | DNA coding | P450 | CYPDN_110 gene | From | Mucor circinelloides |
| NO: 275 | sequence of | | | | f. lusitanicus |
| SEQ ID | Amino acid | P450 | CYPDN_112 protein | From | Choanephora |
| NO: 276 | sequence of | | | | cucurbitarum |
| SEQ ID | DNA coding | P450 | CYPDN_112 gene | From | Choanephora |
| NO: 277 | sequence of | | | | cucurbitarum |
| SEQ ID | Amino acid | P450 | CYPDN_115 protein | From | Lichtheimia |
| NO: 278 | sequence of | | | | corymbifera |
| SEQ ID | DNA coding | P450 | CYPDN_115 gene | From | Lichtheimia |
| NO: 279 | sequence of | | | | corymbifera |
| SEQ ID | Amino acid | P450 | CYPDN_117 protein | From | Lichtheimia |
| NO: 280 | sequence of | | | | corymbifera |
| SEQ ID | DNA coding | P450 | CYPDN_117 gene | From | Lichtheimia |
| NO: 281 | sequence of | | | | corymbifera |
| SEQ ID | Amino acid | P450 | CYPDN_118 protein | From | Lichtheimia ramosa |
| NO: 282 | sequence of | | | | |
| SEQ ID | DNA coding | P450 | CYPDN_118 gene | From | Lichtheimia ramosa |
| NO: 283 | sequence of | | | | |
| SEQ ID | Amino acid | P450 | CYPDN_119 protein | From | Lichtheimia |
| NO: 284 | sequence of | | | | corymbifera |
| SEQ ID | DNA coding | P450 | CYPDN_119 gene | From | Lichtheimia |
| NO: 285 | sequence of | | | | corymbifera |
| SEQ ID | Amino acid | P450 | CYPDN_120 protein | From | Lichtheimia ramosa |
| NO: 286 | sequence of | | | | |
| SEQ ID | DNA coding | P450 | CYPDN_120 gene | From | Lichtheimia ramosa |
| NO: 287 | sequence of | | | | |
| SEQ ID | Amino acid | P450 | CYPDN_123 protein | From | Lichtheimia ramosa |
| NO: 288 | sequence of | | | | |
| SEQ ID | DNA coding | P450 | CYPDN_123 gene | From | Lichtheimia ramosa |
| NO: 289 | sequence of | | | | |
| SEQ ID | Amino acid | P450 | CYPDN_8 protein | From | Rhizopus |
| NO: 290 | sequence of | | | | microsporus |
| SEQ ID | DNA coding | P450 | CYPDN_8 *DNA | From | Rhizopus |
| NO: 291 | sequence of | | | | microsporus |
| SEQ ID | Amino acid | CPR′ | HaCPR_E0A3A7 | From | Helicoverpa |
| NO: 292 | sequence of | | protein | | armigera |
| SEQ ID | DNA coding | CPR′ | HaCPR_E0A3A7 | From | Helicoverpa |
| NO: 293 | sequence of | | *DNA | | armigera |
| SEQ ID | Amino acid | CPR′ | Se_CPR_F1DI27 | From | Spodoptera exigua |
| NO: 294 | sequence of | | | | |
| SEQ ID | DNA coding | CPR′ | Se_CPR_F1DI27 | From | Spodoptera exigua |
| NO: 295 | sequence of | | | | |
| SEQ ID | Amino acid | CPR′ | Bm_CPR_Q9NKV3 | From | Bombyx mori |
| NO: 296 | sequence of | | | | |
| SEQ ID | DNA coding | CPR′ | Bm_CPR_Q9NKV3 | From | Bombyx mori |
| NO: 297 | sequence of | | | | |
| SEQ ID | Amino acid | CPR′ | BmCPR_A0FGR6 | From | Bombyx mandarina |
| NO: 298 | sequence of | | | | |
| SEQ ID | DNA coding | CPR′ | BmCPR_A0FGR6 | From | Bombyx mandarina |
| NO: 299 | sequence of | | | | |
| SEQ ID | Amino acid | CPR′ | ZfCPR_A0A346M705 | From | Zygaena |
| NO: 300 | sequence of | | | | filipendulae |
| SEQ ID | DNA coding | CPR′ | ZfCPR_A0A346M705 | From | Zygaena |
| NO: 301 | sequence of | | | | filipendulae |
| SEQ ID | Amino acid | CPR′ | CmCPR_A0A1S5ZY34 | From | Cnaphalocrocis |
| NO: 302 | sequence of | | | | medinalis |
| SEQ ID | DNA coding | CPR′ | CmCPR_A0A1S5ZY34 | From | Cnaphalocrocis |
| NO: 303 | sequence of | | | | medinalis |
| SEQ ID | DNA coding | CPR′ | HaCPR_E7E2N6 | From | Helicoverpa |
| NO: 304 | sequence of | | | | armigera |
| SEQ ID | Amino acid | CPR′ | CeCPR protein | From | Cunninghamella |
| NO: 305 | sequence of | | | | elegans |
| SEQ ID | DNA coding | CPR′ | CeCPR gene | From | Cunninghamella |
| NO: 306 | sequence of | | | | elegans |
| SEQ ID | Amino acid | Uptake | T1_CjaMDR1_GA | From | Camellia japonica |
| NO: 307 | sequence of | Transporter | | | |
| SEQ ID | DNA coding | Uptake | T1_CjaMDR1_GA | From | Camellia japonica |
| NO: 308 | sequence of | Transporter | | | |
| SEQ ID | Amino acid | Uptake | T3_NcaNPF_GA | From | Noccaea |
| NO: 309 | sequence of | Transporter | | | caerulescens |
| SEQ ID | DNA coding | Uptake | T3_NcaNPF_GA | From | Noccaea |
| NO: 310 | sequence of | Transporter | | | caerulescens |
| SEQ ID | Amino acid | Uptake | T4_EsaGTR_GA | From | Eutrema |
| NO: 311 | sequence of | Transporter | | | salsugineum |
| SEQ ID | DNA coding | Uptake | T4_EsaGTR_GA | From | Eutrema |
| NO: 312 | sequence of | Transporter | | | salsugineum |
| SEQ ID | Amino acid | Uptake | T5_AlyPOT_GA | From | Arabidopsis lyrata |
| NO: 313 | sequence of | Transporter | | | subsp. lyrata |
| SEQ ID | DNA coding | Transporter | T5_AlyPOT_GA | From | Arabidopsis lyrata |
| NO: 314 | sequence of | | | | subsp. lyrata |
| SEQ ID | Amino acid | Uptake | T6_CruGTR_GA | From | Capsella rubella |
| NO: 315 | sequence of | Transporter | | | |
| SEQ ID | DNA coding | Uptake | T6_CruGTR_GA | From | Capsella rubella |
| NO: 316 | sequence of | Transporter | | | |
| SEQ ID | Amino acid | Uptake | T7_PtrPOT_GA | From | Populus |
| NO: 317 | sequence of | Transporter | | | trichocarpa |
| SEQ ID | DNA coding | Uptake | T7_PtrPOT_GA | From | Populus |
| NO: 318 | sequence of | Transporter | | | trichocarpa |
| SEQ ID | Amino acid | Uptake | T8_BnaMFS_GA | From | Brassica napus |
| NO: 319 | sequence of | Transporter | | | |
| SEQ ID | DNA coding | Uptake | T8_BnaMFS_GA | From | Brassica napus |
| NO: 320 | sequence of | Transporter | | | |
| SEQ ID | Amino acid | Uptake | T10_BolGTR_GA | From | Brassica oleracea |
| NO: 321 | sequence of | Transporter | | | var. oleracea |
| SEQ ID | DNA coding | Uptake | T10_BolGTR_GA | From | Brassica oleracea |
| NO: 322 | sequence of | Transporter | | | var. oleracea |
| SEQ ID | Amino acid | Uptake | T11_AthGTR1_GA | From | Arabidopsis |
| NO: 323 | sequence of | Transporter | | | thaliana |
| SEQ ID | DNA coding | Uptake | T11_AthGTR1_GA | From | Arabidopsis |
| NO: 324 | sequence of | Transporter | | | thaliana |
| SEQ ID | Amino acid | Uptake | T12_PsoNPF1_GA | From | Papaver |
| NO: 325 | sequence of | Transporter | | | somniferum |
| SEQ ID | DNA coding | Uptake | T12_PsoNPF1_GA | From | Papaver |
| NO: 326 | sequence of | Transporter | | | somniferum |
| SEQ ID | Amino acid | Uptake | T14_PsoNPF3_GA | From | Papaver |
| NO: 327 | sequence of | Transporter | | | somniferum |
| SEQ ID | DNA coding | Uptake | T14_PsoNPF3_GA | From | Papaver |
| NO: 328 | sequence of | Transporter | | | somniferum |
| SEQ ID | Amino acid | Uptake | T15_PsoNPF4_GA | From | Papaver |
| NO: 329 | sequence of | Transporter | | | somniferum |
| SEQ ID | DNA coding | Uptake | T15_PsoNPF4_GA | From | Papaver |
| NO: 330 | sequence of | Transporter | | | somniferum |
| SEQ ID | Amino acid | Uptake | T17_PsoNPF6_GA | From | Papaver |
| NO: 331 | sequence of | Transporter | | | somniferum |
| SEQ ID | DNA coding | Uptake | T17_PsoNPF6_GA | From | Papaver |
| NO: 332 | sequence of | Transporter | | | somniferum |
| SEQ ID | Amino acid | Uptake | T18_PsoNPF7_GA | From | Papaver |
| NO: 333 | sequence of | Transporter | | | somniferum |
| SEQ ID | DNA coding | Uptake | T18_PsoNPF7_GA | From | Papaver |
| NO: 334 | sequence of | Transporter | | | somniferum |
| SEQ ID | Amino acid | Uptake | T19_RmiPTR2_GA | From | Rhizopus |
| NO: 335 | sequence of | Transporter | | | microsporus |
| SEQ ID | DNA coding | Uptake | T19_RmiPTR2_GA | From | Rhizopus |
| NO: 336 | sequence of | Transporter | | | microsporus |
| SEQ ID | Amino acid | Uptake | T20_RmiPTR2_v2_GA | From | Rhizopus |
| NO: 337 | sequence of | Transporter | | | microsporus |
| SEQ ID | DNA coding | Uptake | T20_RmiPTR2_v2_GA | From | Rhizopus |
| NO: 338 | sequence of | Transporter | | | microsporus |
| SEQ ID | Amino acid | Uptake | T21_RalPTR2_GA | From | Rozella allomycis |
| NO: 339 | sequence of | Transporter | | | |
| SEQ ID | DNA coding | Uptake | T21_RalPTR2_GA | From | Rozella allomycis |
| NO: 340 | sequence of | Transporter | | | |
| SEQ ID | Amino acid | Uptake | T22_CanPOT_GA | From | Catenaria |
| NO: 341 | sequence of | Transporter | | | anguillulae |
| SEQ ID | DNA coding | Uptake | T22_CanPOT_GA | From | Catenaria |
| NO: 342 | sequence of | Transporter | | | anguillulae |
| SEQ ID | Amino acid | Uptake | T23_ArePOT_GA | From | Absidia repens |
| NO: 343 | sequence of | Transporter | | | |
| SEQ ID | DNA coding | Uptake | T23_ArePOT_GA | From | Absidia repens |
| NO: 344 | sequence of | Transporter | | | |
| SEQ ID | Amino acid | Uptake | T24_SlyPTR2_GA | From | Stemphylium |
| NO: 345 | sequence of | Transporter | | | lycopersici |
| SEQ ID | DNA coding | Uptake | T24_SlyPTR2_GA | From | Stemphylium |
| NO: 346 | sequence of | Transporter | | | lycopersici |
| SEQ ID | Amino acid | Uptake | T25_AorPOT_GA | From | Aspergillus oryzae |
| NO: 347 | sequence of | Transporter | | | |
| SEQ ID | DNA coding | Uptake | T25_AorPOT_GA | From | Aspergillus oryzae |
| NO: 348 | sequence of | Transporter | | | |
| SEQ ID | Amino acid | Uptake | T26_NfuPOT_GA | From | Neosartorya |
| NO: 349 | sequence of | Transporter | | | fumigata |
| SEQ ID | DNA coding | Uptake | T26_NfuPOT_GA | From | Neosartorya |
| NO: 350 | sequence of | Transporter | | | fumigata |
| SEQ ID | Amino acid | Uptake | T27_FoxPOT_GA | From | Fusarium |
| NO: 351 | sequence of | Transporter | | | oxysporum |
| SEQ ID | DNA coding | Uptake | T27_FoxPOT_GA | From | Fusarium |
| NO: 352 | sequence of | Transporter | | | oxysporum |
| SEQ ID | Amino acid | Uptake | T28_MciPOT_GA | From | Mucor circinelloides |
| NO: 353 | sequence of | Transporter | | | f. circinelloides |
| SEQ ID | DNA coding | Uptake | T28_MciPOT_GA | From | Mucor circinelloides |
| NO: 354 | sequence of | Transporter | | | f. circinelloides |
| SEQ ID | Amino acid | Uptake | T29_AcaPOT_GA | From | Aspergillus |
| NO: 355 | sequence of | Transporter | | | calidoustus |
| SEQ ID | DNA coding | Uptake | T29_AcaPOT_GA | From | Aspergillus |
| NO: 356 | sequence of | Transporter | | | calidoustus |
| SEQ ID | Amino acid | Uptake | T30_MlyPOT_GA | From | Microbotryum |
| NO: 357 | sequence of | Transporter | | | lychnidis-dioicae |
| SEQ ID | DNA coding | Uptake | T30_MlyPOT_GA | From | Microbotryum |
| NO: 358 | sequence of | Transporter | | | lychnidis-dioicae |
| SEQ ID | Amino acid | Uptake | T31_TgaPOT_GA | From | Trichoderma gamsii |
| NO: 359 | sequence of | Transporter | | | |
| SEQ ID | DNA coding | Uptake | T31_TgaPOT_GA | From | Trichoderma gamsii |
| NO: 360 | sequence of | Transporter | | | |
| SEQ ID | Amino acid | Uptake | T32_AarPOT_GA | From | Aspergillus |
| NO: 361 | sequence of | Transporter | | | arachidicola |
| SEQ ID | DNA coding | Uptake | T32_AarPOT_GA | From | Aspergillus |
| NO: 362 | sequence of | Transporter | | | arachidicola |
| SEQ ID | Amino acid | Uptake | T33_CcuPTR2_GA | From | Choanephora |
| NO: 363 | sequence of | Transporter | | | cucurbitarum |
| SEQ ID | DNA coding | Uptake | T33_CcuPTR2_GA | From | Choanephora |
| NO: 364 | sequence of | Transporter | | | cucurbitarum |
| SEQ ID | Amino acid | Uptake | T34_HvePOT_GA | From | Hesseltinella |
| NO: 365 | sequence of | Transporter | | | vesiculosa |
| SEQ ID | DNA coding | Uptake | T34_HvePOT_GA | From | Hesseltinella |
| NO: 366 | sequence of | Transporter | | | vesiculosa |
| SEQ ID | Amino acid | Uptake | T35_EcuPOT_GA | From | Encephalitozoon |
| NO: 367 | sequence of | Transporter | | | cuniculi |
| SEQ ID | DNA coding | Uptake | T35_EcuPOT_GA | From | Encephalitozoon |
| NO: 368 | sequence of | Transporter | | | cuniculi |
| SEQ ID | Amino acid | Uptake | T36_RnePOT_GA | From | Rosellinia necatrix |
| NO: 369 | sequence of | Transporter | | | |
| SEQ ID | DNA coding | Uptake | T36_RnePOT_GA | From | Rosellinia necatrix |
| NO: 370 | sequence of | Transporter | | | |
| SEQ ID | Amino acid | Uptake | T37_OcoPOT_GA | From | Ordospora colligata |
| NO: 371 | sequence of | Transporter | | | |
| SEQ ID | DNA coding | Uptake | T37_OcoPOT_GA | From | Ordospora colligata |
| NO: 372 | sequence of | Transporter | | | |
| SEQ ID | Amino acid | Uptake | T38_ScuPTR2_GA | From | Smittium culicis |
| NO: 373 | sequence of | Transporter | | | |
| SEQ ID | DNA coding | Uptake | T38_ScuPTR2_GA | From | Smittium culicis |
| NO: 374 | sequence of | Transporter | | | |
| SEQ ID | Amino acid | Uptake | T39_CgrPOT_GA | From | Colletotrichum |
| NO: 375 | sequence of | Transporter | | | graminicola |
| SEQ ID | DNA coding | Uptake | T39_CgrPOT_GA | From | Colletotrichum |
| NO: 376 | sequence of | Transporter | | | graminicola |
| SEQ ID | Amino acid | Uptake | T40_EdePOT_GA | From | Exophiala |
| NO: 377 | sequence of | Transporter | | | dermatitidis |
| SEQ ID | DNA coding | Uptake | T40_EdePOT_GA | From | Exophiala |
| NO: 378 | sequence of | Transporter | | | dermatitidis |
| SEQ ID | Amino acid | Uptake | T41_CalPTR2_GA | From | Candida albicans |
| NO: 379 | sequence of | Transporter | | | |
| SEQ ID | DNA coding | Uptake | T41_CalPTR2_GA | From | Candida albicans |
| NO: 380 | sequence of | Transporter | | | |
| SEQ ID | Amino acid | Uptake | T44_CcaMFS_GA | From | Cajanus cajan |
| NO: 381 | sequence of | Transporter | | | |
| SEQ ID | DNA coding | Uptake | T44_CcaMFS_GA | From | Cajanus cajan |
| NO: 382 | sequence of | Transporter | | | |
| SEQ ID | Amino acid | Uptake | T45_PanPOT_GA | From | Parasponia |
| NO: 383 | sequence of | Transporter | | | andersonii |
| SEQ ID | DNA coding | Uptake | T45_PanPOT_GA | From | Parasponia |
| NO: 384 | sequence of | Transporter | | | andersonii |
| SEQ ID | Amino acid | Uptake | T46_RchPOT_GA | From | Rosa chinensis |
| NO: 385 | sequence of | Transporter | | | |
| SEQ ID | DNA coding | Uptake | T46_RchPOT_GA | From | Rosa chinensis |
| NO: 386 | sequence of | Transporter | | | |
| SEQ ID | Amino acid | Uptake | T47_PbeNPF_GA | From | Pyrus betulifolia |
| NO: 387 | sequence of | Transporter | | | |
| SEQ ID | DNA coding | Uptake | T47_PbeNPF_GA | From | Pyrus betulifolia |
| NO: 388 | sequence of | Transporter | | | |
| SEQ ID | Amino acid | Uptake | T48_CcaPOT_GA | From | Corchorus |
| NO: 389 | sequence of | Transporter | | | capsularis |
| SEQ ID | DNA coding | Uptake | T48_CcaPOT_GA | From | Corchorus |
| NO: 390 | sequence of | Transporter | | | capsularis |
| SEQ ID | Amino acid | Uptake | T49_HanPOT_GA | From | Helianthus annuus |
| NO: 391 | sequence of | Transporter | | | |
| SEQ ID | DNA coding | Uptake | T49_HanPOT_GA | From | Helianthus annuus |
| NO: 392 | sequence of | Transporter | | | |
| SEQ ID | Amino acid | Uptake | T50_HimPOT_GA | From | Handroanthus |
| NO: 393 | sequence of | Transporter | | | impetiginosus |
| SEQ ID | DNA coding | Uptake | T50_HimPOT_GA | From | Handroanthus |
| NO: 394 | sequence of | Transporter | | | impetiginosus |
| SEQ ID | Amino acid | Uptake | T51_TorPOT_GA | From | Trema orientalis |
| NO: 395 | sequence of | Transporter | | | |
| SEQ ID | DNA coding | Uptake | T51_TorPOT_GA | From | Trema orientalis |
| NO: 396 | sequence of | Transporter | | | |
| SEQ ID | Amino acid | Uptake | T52_BmePTR2_GA | From | Basidiobolus |
| NO: 397 | sequence of | Transporter | | | meristosporus |
| SEQ ID | DNA coding | Uptake | T52_BmePTR2_GA | From | Basidiobolus |
| NO: 398 | sequence of | Transporter | | | meristosporus |
| SEQ ID | Amino acid | Uptake | T53_EhePOT_GA | From | Encephalitozoon |
| NO: 399 | sequence of | Transporter | | | hellem |
| SEQ ID | DNA coding | Uptake | T53_EhePOT_GA | From | Encephalitozoon |
| NO: 400 | sequence of | Transporter | | | hellem |
| SEQ ID | Amino acid | Uptake | T54_MelPOT_GA | From | Mortierella elongata |
| NO: 401 | sequence of | Transporter | | | |
| SEQ ID | DNA coding | Uptake | T54_MelPOT_GA | From | Mortierella elongata |
| NO: 402 | sequence of | Transporter | | | |
| SEQ ID | Amino acid | Uptake | T55_NsyNPF_GA | From | Nicotiana sylvestris |
| NO: 403 | sequence of | Transporter | | | |
| SEQ ID | DNA coding | Uptake | T55_NsyNPF_GA | From | Nicotiana sylvestris |
| NO: 404 | sequence of | Transporter | | | |
| SEQ ID | Amino acid | Uptake | T56_CanNPF_GA | From | Capsicum annuum |
| NO: 405 | sequence of | Transporter | | | |
| SEQ ID | DNA coding | Uptake | T56_CanNPF_GA | From | Capsicum annuum |
| NO: 406 | sequence of | Transporter | | | |
| SEQ ID | Amino acid | Uptake | T57_AcoNPF_GA | From | Aquilegia coerulea |
| NO: 407 | sequence of | Transporter | | | |
| SEQ ID | DNA coding | Uptake | T57_AcoNPF_GA | From | Aquilegia coerulea |
| NO: 408 | sequence of | Transporter | | | |
| SEQ ID | Amino acid | Uptake | T59_AmeNPF1_GA | From | Argemone mexican |
| NO: 409 | sequence of | Transporter | | | |
| SEQ ID | DNA coding | Uptake | T59_AmeNPF1_GA | From | Argemone mexican |
| NO: 410 | sequence of | Transporter | | | |
| SEQ ID | Amino acid | Uptake | T60_AmeNPF2_GA | From | Argemone mexican |
| NO: 411 | sequence of | Transporter | | | |
| SEQ ID | DNA coding | Uptake | T60_AmeNPF2_GA | From | Argemone mexican |
| NO: 412 | sequence of | Transporter | | | |
| SEQ ID | Amino acid | Uptake | T61_TwiNPF_GA | From | Tripterygium |
| NO: 413 | sequence of | Transporter | | | wilfordii |
| SEQ ID | DNA coding | Uptake | T61_TwiNPF_GA | From | Tripterygium |
| NO: 414 | sequence of | Transporter | | | wilfordii |
| SEQ ID | Amino acid | Uptake | T62_SmaNPF_GA | From | Swietenia |
| NO: 415 | sequence of | Transporter | | | mahagoni |
| SEQ ID | DNA coding | Uptake | T62_SmaNPF_GA | From | Swietenia |
| NO: 416 | sequence of | Transporter | | | mahagoni |
| SEQ ID | Amino acid | Uptake | T63_CfoNPF_GA | From | Coleus forskohlii |
| NO: 417 | sequence of | Transporter | | | |
| SEQ ID | DNA coding | Uptake | T63_CfoNPF_GA | From | Coleus forskohlii |
| NO: 418 | sequence of | Transporter | | | |
| SEQ ID | Amino acid | Uptake | T64_XsiNPF_GA | From | Xanthorhiza |
| NO: 419 | sequence of | Transporter | | | simplicissima |
| SEQ ID | DNA coding | Uptake | T64_XsiNPF_GA | From | Xanthorhiza |
| NO: 420 | sequence of | Transporter | | | simplicissima |
| SEQ ID | Amino acid | Uptake | T66_TeINPF_GA | From | Tabernaemontana |
| NO: 421 | sequence of | Transporter | | | elegans |
| SEQ ID | DNA coding | Uptake | T66_TeINPF_GA | From | Tabernaemontana |
| NO: 422 | sequence of | Transporter | | | elegans |
| SEQ ID | Amino acid | Uptake | T67_SdiNPF_GA | From | Stylophorum |
| NO: 423 | sequence of | Transporter | | | diphyllum |
| SEQ ID | DNA coding | Uptake | T67_SdiNPF_GA | From | Stylophorum |
| NO: 424 | sequence of | Transporter | | | diphyllum |
| SEQ ID | Amino acid | Uptake | T68_RseNPF_GA | From | Rauwolfia |
| NO: 425 | sequence of | Transporter | | | serpentina |
| SEQ ID | DNA coding | Uptake | T68_RseNPF_GA | From | Rauwolfia |
| NO: 426 | sequence of | Transporter | | | serpentina |
| SEQ ID | Amino acid | Uptake | T69_PhoNPF_GA | From | pelargonium × |
| NO: 427 | sequence of | Transporter | | | hortorum |
| SEQ ID | DNA coding | Uptake | T69_PhoNPF_GA | From | pelargonium × |
| NO: 428 | sequence of | Transporter | | | hortorum |
| SEQ ID | Amino acid | Uptake | T70_CmaNPF_GA | From | Chelidonium majus |
| NO: 429 | sequence of | Transporter | | | |
| SEQ ID | DNA coding | Uptake | T70_CmaNPF_GA | From | Chelidonium majus |
| NO: 430 | sequence of | Transporter | | | |
| SEQ ID | Amino acid | Uptake | T71_CchNPF_GA | From | Corydalis |
| NO: 431 | sequence of | Transporter | | | chelanthifolia |
| SEQ ID | DNA coding | Uptake | T71_CchNPF_GA | From | Corydalis |
| NO: 432 | sequence of | Transporter | | | chelanthifolia |
| SEQ ID | Amino acid | Uptake | T72_TcoNPF_GA | From | Tinospora_cordifolia |
| NO: 433 | sequence of | Transporter | | | |
| SEQ ID | DNA coding | Uptake | T72_TcoNPF_GA | From | Tinospora_cordifolia |
| NO: 434 | sequence of | Transporter | | | |
| SEQ ID | Amino acid | Uptake | T73_PbrNPF1_GA | From | Papaver |
| NO: 435 | sequence of | Transporter | | | bracteatum |
| SEQ ID | DNA coding | Uptake | T73_PbrNPF1_GA | From | Papaver |
| NO: 436 | sequence of | Transporter | | | bracteatum |
| SEQ ID | Amino acid | Uptake | T74_PbrNPF2_GA | From | Papaver |
| NO: 437 | sequence of | Transporter | | | bracteatum |
| SEQ ID | DNA coding | Uptake | T74_PbrNPF2_GA | From | Papaver |
| NO: 438 | sequence of | Transporter | | | bracteatum |
| SEQ ID | Amino acid | Uptake | T75_PbrNPF3_GA | From | Papaver |
| NO: 439 | sequence of | Transporter | | | bracteatum |
| SEQ ID | DNA coding | Uptake | T75_PbrNPF3_GA | From | Papaver |
| NO: 440 | sequence of | Transporter | | | bracteatum |
| SEQ ID | Amino acid | Uptake | T76_AhuNPF_GA | From | Amsonia hubrichtii |
| NO: 441 | sequence of | Transporter | | | |
| SEQ ID | DNA coding | Uptake | T76_AhuNPF_GA | From | Amsonia hubrichtii |
| NO: 442 | sequence of | Transporter | | | |
| SEQ ID | Amino acid | Uptake | T77_PocNPF_GA | From | Platanus |
| NO: 443 | sequence of | Transporter | | | occidentalis |
| SEQ ID | DNA coding | Uptake | T77_PocNPF_GA | From | Platanus |
| NO: 444 | sequence of | Transporter | | | occidentalis |
| SEQ ID | Amino acid | Uptake | T78_VofNPF_GA | From | Valeriana officinalis |
| NO: 445 | sequence of | Transporter | | | |
| SEQ ID | DNA coding | Uptake | T78_VofNPF_GA | From | Valeriana officinalis |
| NO: 446 | sequence of | Transporter | | | |
| SEQ ID | Amino acid | Uptake | T79_EcaNPF_GA | From | Eschscholzia |
| NO: 447 | sequence of | Transporter | | | californica |
| SEQ ID | DNA coding | Uptake | T79_EcaNPF_GA | From | Eschscholzia |
| NO: 448 | sequence of | Transporter | | | californica |
| SEQ ID | Amino acid | Uptake | T80_CroNPF_GA | From | Catharanthus |
| NO: 449 | sequence of | Transporter | | | roseus |
| SEQ ID | DNA coding | Uptake | T80_CroNPF_GA | From | Catharanthus |
| NO: 450 | sequence of | Transporter | | | roseus |
| SEQ ID | Amino acid | Uptake | T81_HcaNPF_GA | From | Hypericum |
| NO: 451 | sequence of | Transporter | | | perforatum |
| SEQ ID | DNA coding | Uptake | T81_HcaNPF_GA | From | Hypericum |
| NO: 452 | sequence of | Transporter | | | perforatum |
| SEQ ID | Amino acid | Uptake | T82_NsaNPF_GA | From | Nigella sativa |
| NO: 453 | sequence of | Transporter | | | |
| SEQ ID | DNA coding | Uptake | T82_NsaNPF_GA | From | Nigella sativa |
| NO: 454 | sequence of | Transporter | | | |
| SEQ ID | Amino acid | Uptake | T83_ScaNPF_GA | From | Sanguinaria |
| NO: 455 | sequence of | Transporter | | | canadensis |
| SEQ ID | DNA coding | Uptake | T83_ScaNPF_GA | From | Sanguinaria |
| NO: 456 | sequence of | Transporter | | | canadensis |
| SEQ ID | Amino acid | Uptake | T84_TflNPF_GA | From | Thalictrum flavum |
| NO: 457 | sequence of | Transporter | | | |
| SEQ ID | DNA coding | Uptake | T84_TflNPF_GA | From | Thalictrum flavum |
| NO: 458 | sequence of | Transporter | | | |
| SEQ ID | Amino acid | Uptake | T85_GflNPF_GA | From | Glaucium Flavum |
| NO: 459 | sequence of | Transporter | | | |
| SEQ ID | DNA coding | Uptake | T85_GflNPF_GA | From | Glaucium Flavum |
| NO: 460 | sequence of | Transporter | | | |
| SEQ ID | Amino acid | Uptake | T97_ScaT14_GA | From | Sanguinaria |
| NO: 461 | sequence of | Transporter | | | canadensis |
| SEQ ID | DNA coding | Uptake | T97_ScaT14_GA | From | Sanguinaria |
| NO: 462 | sequence of | Transporter | | | canadensis |
| SEQ ID | Amino acid | Uptake | T101_McoPUP3_1 | From | Macleaya cordata |
| NO: 463 | sequence of | Transporter | | | |
| SEQ ID | DNA coding | Uptake | T101_McoPUP3_1 | From | Macleaya cordata |
| NO: 464 | sequence of | Transporter | | | |
| SEQ ID | Amino acid | Uptake | T102_PsoPUP3_1 | From | Papaver |
| NO: 465 | sequence of | Transporter | | | somniferum |
| SEQ ID | DNA coding | Uptake | T102_PsoPUP3_1 | From | Papaver |
| NO: 466 | sequence of | Transporter | | | somniferum |
| SEQ ID | Amino acid | Uptake | T103_PsoPUP3_2 | From | Papaver |
| NO: 467 | sequence of | Transporter | | | somniferum |
| SEQ ID | DNA coding | Uptake | T103_PsoPUP3_2 | From | Papaver |
| NO: 468 | sequence of | Transporter | | | somniferum |
| SEQ ID | Amino acid | Uptake | T104_PsoPUP3_3 | From | Papaver |
| NO: 469 | sequence of | Transporter | | | somniferum |
| SEQ ID | DNA coding | Uptake | T104_PsoPUP3_3 | From | Papaver |
| NO: 470 | sequence of | Transporter | | | somniferum |
| SEQ ID | Amino acid | Uptake | T105_PsoPUP-L | From | Papaver |
| NO: 471 | sequence of | Transporter | | | somniferum |
| SEQ ID | DNA coding | Uptake | T105_PsoPUP-L | From | Papaver |
| NO: 472 | sequence of | Transporter | | | somniferum |
| SEQ ID | Amino acid | Uptake | T109_GflPUP3_83 | From | Glaucium Flavum |
| NO: 473 | sequence of | Transporter | | | |
| SEQ ID | DNA coding | Uptake | T109_GflPUP3_83 | From | Glaucium Flavum |
| NO: 474 | sequence of | Transporter | | | |
| SEQ ID | Amino acid | Uptake | T113_PsoPUP3_32 | From | Papaver |
| NO: 475 | sequence of | Transporter | | | somniferum |
| SEQ ID | DNA coding | Uptake | T113_PsoPUP3_32 | From | Papaver |
| NO: 476 | sequence of | Transporter | | | somniferum |
| SEQ ID | Amino acid | Uptake | T114_TorPUP3_40 | From | Trema orientale |
| NO: 477 | sequence of | Transporter | | | |
| SEQ ID | DNA coding | Transporter | T114_TorPUP3_40 | From | Trema orientale |
| NO: 478 | sequence of | | | | |
| SEQ ID | Amino acid | Uptake | T115_CsaPUP3_48 | From | Cucumis sativus |
| NO: 479 | sequence of | Transporter | | | |
| SEQ ID | DNA coding | Uptake | T115_CsaPUP3_48 | From | Cucumis sativus |
| NO: 480 | sequence of | Transporter | | | |
| SEQ ID | Amino acid | Uptake | T116_HanPUP3_56 | From | Helianthus annuus |
| NO: 481 | sequence of | Transporter | | | |
| SEQ ID | DNA coding | Uptake | T116_HanPUP3_56 | From | Helianthus annuus |
| NO: 482 | sequence of | Transporter | | | |
| SEQ ID | Amino acid | Uptake | T117_MacPUP3_64 | From | Musa acuminata |
| NO: 483 | sequence of | Transporter | | | |
| SEQ ID | DNA coding | Uptake | T117_MacPUP3_64 | From | Musa acuminata |
| NO: 484 | sequence of | Transporter | | | |
| SEQ ID | Amino acid | Uptake | T121_NnuPUP3_9 | From | Nelumbo nucifera |
| NO: 485 | sequence of | Transporter | | | |
| SEQ ID | DNA coding | Uptake | T121_NnuPUP3_9 | From | Nelumbo nucifera |
| NO: 486 | sequence of | Transporter | | | |
| SEQ ID | Amino acid | Uptake | T122_PsoPUP3_17 | From | Papaver |
| NO: 487 | sequence of | Transporter | | | somniferum |
| SEQ ID | DNA coding | Uptake | T122_PsoPUP3_17 | From | Papaver |
| NO: 488 | sequence of | Transporter | | | somniferum |
| SEQ ID | Amino acid | Uptake | T123_PsoPUP3_25 | From | Papaver |
| NO: 489 | sequence of | Transporter | | | somniferum |
| SEQ ID | DNA coding | Uptake | T123_PsoPUP3_25 | From | Papaver |
| NO: 490 | sequence of | Transporter | | | somniferum |
| SEQ ID | Amino acid | Uptake | T124_PsoPUP3_33 | From | Papaver |
| NO: 491 | sequence of | Transporter | | | somniferum |
| SEQ ID | DNA coding | Uptake | T124_PsoPUP3_33 | From | Papaver |
| NO: 492 | sequence of | Transporter | | | somniferum |
| SEQ ID | Amino acid | Uptake | T125_JcuPUP3_41 | From | Jatropha curcas |
| NO: 493 | sequence of | Transporter | | | |
| SEQ ID | DNA coding | Uptake | T125_JcuPUP3_41 | From | Jatropha curcas |
| NO: 494 | sequence of | Transporter | | | |
| SEQ ID | Amino acid | Uptake | T126_CpePUP3_49 | From | Cucurbita pepo |
| NO: 495 | sequence of | Transporter | | | subsp. pepo |
| SEQ ID | DNA coding | Uptake | T126_CpePUP3_49 | From | Cucurbita pepo |
| NO: 496 | sequence of | Transporter | | | subsp. pepo |
| SEQ ID | Amino acid | Uptake | T127_LsaPUP3_57 | From | Lactuca sativa |
| NO: 497 | sequence of | Transporter | | | |
| SEQ ID | DNA coding | Uptake | T127_LsaPUP3_57 | From | Lactuca sativa |
| NO: 498 | sequence of | Transporter | | | |
| SEQ ID | Amino acid | Uptake | T128_PsoPUP3_65 | From | Papaver |
| NO: 499 | sequence of | Transporter | | | somniferum |
| SEQ ID | DNA coding | Uptake | T128_PsoPUP3_65 | From | Papaver |
| NO: 500 | sequence of | Transporter | | | somniferum |
| SEQ ID | Amino acid | Uptake | T129_PsoPUP3_73 | From | Papaver |
| NO: 501 | sequence of | Transporter | | | somniferum |
| SEQ ID | DNA coding | Uptake | T129_PsoPUP3_73 | From | Papaver |
| NO: 502 | sequence of | Transporter | | | somniferum |
| SEQ ID | Amino acid | Uptake | T130_NdoPUP3_89 | From | Nandina domestica |
| NO: 503 | sequence of | Transporter | | | |
| SEQ ID | DNA coding | Uptake | T130_NdoPUP3_89 | From | Nandina domestica |
| NO: 504 | sequence of | Transporter | | | |
| SEQ ID | Amino acid | Uptake | T131_PbrPUP3_81 | From | Papaver |
| NO: 505 | sequence of | Transporter | | | bracteatum |
| SEQ ID | DNA coding | Uptake | T131_PbrPUP3_81 | From | Papaver |
| NO: 506 | sequence of | Transporter | | | bracteatum |
| SEQ ID | Amino acid | Uptake | T132_CmiPUP3_10 | From | Cinnamomum |
| NO: 507 | sequence of | Transporter | | | micranthum |
| | | | | | f. kanehirae |
| SEQ ID | DNA coding | Uptake | T132_CmiPUP3_10 | From | Cinnamomum |
| NO: 508 | sequence of | Transporter | | | micranthum |
| | | | | | f. kanehirae |
| SEQ ID | Amino acid | Uptake | T133_PsoPUP3_18 | From | Papaver |
| NO: 509 | sequence of | Transporter | | | somniferum |
| SEQ ID | DNA coding | Uptake | T133_PsoPUP3_18 | From | Papaver |
| NO: 510 | sequence of | Transporter | | | somniferum |
| SEQ ID | Amino acid | Uptake | T135_PsoPUP_34 | From | Papaver |
| NO: 511 | sequence of | Transporter | | | somniferum |
| SEQ ID | DNA coding | Uptake | T135_PsoPUP_34 | From | Papaver |
| NO: 512 | sequence of | Transporter | | | somniferum |
| SEQ ID | Amino acid | Uptake | T136_RchPUP3_42 | From | Rosa chinensis |
| NO: 513 | sequence of | Transporter | | | |
| SEQ ID | DNA coding | Uptake | T136_RchPUP3_42 | From | Rosa chinensis |
| NO: 514 | sequence of | Transporter | | | |
| SEQ ID | Amino acid | Uptake | T137_EguPUP3_50 | From | Erythranthe guttata |
| NO: 515 | sequence of | Transporter | | | |
| SEQ ID | DNA coding | Uptake | T137_EguPUP3_50 | From | Erythranthe guttata |
| NO: 516 | sequence of | Transporter | | | |
| SEQ ID | Amino acid | Uptake | T138_AduPUP3_58 | From | Arachis duranensis |
| NO: 517 | sequence of | Transporter | | | |
| SEQ ID | DNA coding | Uptake | T138_AduPUP3_58 | From | Arachis duranensis |
| NO: 518 | sequence of | Transporter | | | |
| SEQ ID | Amino acid | Uptake | T139_PsoPUP3_66 | From | Papaver |
| NO: 519 | sequence of | Transporter | | | somniferum |
| SEQ ID | DNA coding | Uptake | T139_PsoPUP3_66 | From | Papaver |
| NO: 520 | sequence of | Transporter | | | somniferum |
| SEQ ID | Amino acid | Uptake | T140_PalPUP3_74 | From | Papaver alpinum |
| NO: 521 | sequence of | Transporter | | | |
| SEQ ID | DNA coding | Uptake | T140_PalPUP3_74 | From | Papaver alpinum |
| NO: 522 | sequence of | Transporter | | | |
| SEQ ID | Amino acid | Uptake | T141_EcaPUP3_88 | From | Eschscholzia |
| NO: 523 | sequence of | Transporter | | | californica |
| SEQ ID | DNA coding | Uptake | T141_EcaPUP3_88 | From | Eschscholzia |
| NO: 524 | sequence of | Transporter | | | californica |
| SEQ ID | Amino acid | Uptake | T142_McoPUP3_4 | From | Macleaya cordata |
| NO: 525 | sequence of | Transporter | | | |
| SEQ ID | DNA coding | Uptake | T142_McoPUP3_4 | From | Macleaya cordata |
| NO: 526 | sequence of | Transporter | | | |
| SEQ ID | Amino acid | Uptake | T143_CmiPUP3_11 | From | Cinnamomum |
| NO: 527 | sequence of | Transporter | | | micranthum |
| | | | | | f. kanehirae |
| SEQ ID | DNA coding | Uptake | T143_CmiPUP3_11 | From | Cinnamomum |
| NO: 528 | sequence of | Transporter | | | micranthum |
| | | | | | f. kanehirae |
| SEQ ID | Amino acid | Uptake | T144_PsoPUP3_19 | From | Papaver |
| NO: 529 | sequence of | Transporter | | | somniferum |
| SEQ ID | DNA coding | Uptake | T144_PsoPUP3_19 | From | Papaver |
| NO: 530 | sequence of | Transporter | | | somniferum |
| SEQ ID | Amino acid | Uptake | T146_PsoPUP_35 | From | Papaver |
| NO: 531 | sequence of | Transporter | | | somniferum |
| SEQ ID | DNA coding | Uptake | T146_PsoPUP_35 | From | Papaver |
| NO: 532 | sequence of | Transporter | | | somniferum |
| SEQ ID | Amino acid | Uptake | T147_MesPUP3_43 | From | Manihot esculenta |
| NO: 533 | sequence of | Transporter | | | |
| SEQ ID | DNA coding | Uptake | T147_MesPUP3_43 | From | Manihot esculenta |
| NO: 534 | sequence of | Transporter | | | |
| SEQ ID | Amino acid | Uptake | T148_HimPUP3_51 | From | Handroanthus |
| NO: 535 | sequence of | Transporter | | | impetiginosus |
| SEQ ID | DNA coding | Uptake | T148_HimPUP3_51 | From | Handroanthus |
| NO: 536 | sequence of | Transporter | | | impetiginosus |
| SEQ ID | Amino acid | Uptake | T149_AcoPUP3_59 | From | Aquilegia coerulea |
| NO: 537 | sequence of | Transporter | | | |
| SEQ ID | DNA coding | Uptake | T149_AcoPUP3_59 | From | Aquilegia coerulea |
| NO: 538 | sequence of | Transporter | | | |
| SEQ ID | Amino acid | Uptake | T150_PsoPUP3_67 | From | Papaver |
| NO: 539 | sequence of | Transporter | | | somniferum |
| SEQ ID | DNA coding | Uptake | T150_PsoPUP3_67 | From | Papaver |
| NO: 540 | sequence of | Transporter | | | somniferum |
| SEQ ID | Amino acid | Uptake | T151_PatPUP3_75 | From | Papaver atlanticum |
| NO: 541 | sequence of | Transporter | | | |
| SEQ ID | DNA coding | Uptake | T151_PatPUP3_75 | From | Papaver atlanticum |
| NO: 542 | sequence of | Transporter | | | |
| SEQ ID | Amino acid | Uptake | T152_GflPUP3_87 | From | Glaucium Flavum |
| NO: 543 | sequence of | Transporter | | | |
| SEQ ID | DNA coding | Uptake | T152_GflPUP3_87 | From | Glaucium Flavum |
| NO: 544 | sequence of | Transporter | | | |
| SEQ ID | Amino acid | Uptake | T153_PsoPUP3_5 | From | Papaver |
| NO: 545 | sequence of | Transporter | | | somniferum |
| SEQ ID | DNA coding | Uptake | T153_PsoPUP3_5 | From | Papaver |
| NO: 546 | sequence of | Transporter | | | somniferum |
| SEQ ID | Amino acid | Uptake | T154_CmiPUP3_12 | From | Cinnamomum |
| NO: 547 | sequence of | Transporter | | | micranthum |
| | | | | | f. kanehirae |
| SEQ ID | DNA coding | Uptake | T154_CmiPUP3_12 | From | Cinnamomum |
| NO: 548 | sequence of | Transporter | | | micranthum |
| | | | | | f. kanehirae |
| SEQ ID | Amino acid | Uptake | T156_PsoPUP3_28 | From | Papaver |
| NO: 549 | sequence of | Transporter | | | somniferum |
| SEQ ID | DNA coding | Uptake | T156_PsoPUP3_28 | From | Papaver |
| NO: 550 | sequence of | Transporter | | | somniferum |
| SEQ ID | Amino acid | Uptake | T157_RchPUP_36 | From | Rosa chinensis |
| NO: 551 | sequence of | Transporter | | | |
| SEQ ID | DNA coding | Uptake | T157_RchPUP_36 | From | Rosa chinensis |
| NO: 552 | sequence of | Transporter | | | |
| SEQ ID | Amino acid | Uptake | T158_DziPUP3_44 | From | Durio zibethinus |
| NO: 553 | sequence of | Transporter | | | |
| SEQ ID | DNA coding | Uptake | T158_DziPUP3_44 | From | Durio zibethinus |
| NO: 554 | sequence of | Transporter | | | |
| SEQ ID | Amino acid | Uptake | T159_OeuPUP3_52 | From | Olea europaea var. |
| NO: 555 | sequence of | Transporter | | | sylvestris |
| SEQ ID | DNA coding | Uptake | T159_OeuPUP3_52 | From | Olea europaea var. |
| NO: 556 | sequence of | Transporter | | | sylvestris |
| SEQ ID | Amino acid | Uptake | T160_CeuPUP3_60 | From | Coffea eugenioides |
| NO: 557 | sequence of | Transporter | | | |
| SEQ ID | DNA coding | Uptake | T160_CeuPUP3_60 | From | Coffea eugenioides |
| NO: 558 | sequence of | Transporter | | | |
| SEQ ID | Amino acid | Uptake | T161_PsoPUP3_68 | From | Papaver |
| NO: 559 | sequence of | Transporter | | | somniferum |
| SEQ ID | DNA coding | Uptake | T161_PsoPUP3_68 | From | Papaver |
| NO: 560 | sequence of | Transporter | | | somniferum |
| SEQ ID | Amino acid | Uptake | T162_PmiPUP3_76 | From | Papaver |
| NO: 561 | sequence of | Transporter | | | miyabeanum |
| SEQ ID | DNA coding | Uptake | T162_PmiPUP3_76 | From | Papaver |
| NO: 562 | sequence of | Transporter | | | miyabeanum |
| SEQ ID | Amino acid | Uptake | T163_PbrPUP3_86 | From | Papaver |
| NO: 563 | sequence of | Transporter | | | bracteatum |
| SEQ ID | DNA coding | Uptake | T163_PbrPUP3_86 | From | Papaver |
| NO: 564 | sequence of | Transporter | | | bracteatum |
| SEQ ID | Amino acid | Uptake | T164_PsoPUP3_78 | From | Papaver |
| NO: 565 | sequence of | Transporter | | | somniferum |
| SEQ ID | DNA coding | Uptake | T164_PsoPUP3_78 | From | Papaver |
| NO: 566 | sequence of | Transporter | | | somniferum |
| SEQ ID | Amino acid | Uptake | T165_AcoPUP3_13 | From | Aquilegia coerulea |
| NO: 567 | sequence of | Transporter | | | |
| SEQ ID | DNA coding | Uptake | T165_AcoPUP3_13 | From | Aquilegia coerulea |
| NO: 568 | sequence of | Transporter | | | |
| SEQ ID | Amino acid | Uptake | T166_PsoPUP3_21 | From | Papaver |
| NO: 569 | sequence of | Transporter | | | somniferum |
| SEQ ID | DNA coding | Uptake | T166_PsoPUP3_21 | From | Papaver |
| NO: 570 | sequence of | Transporter | | | somniferum |
| SEQ ID | Amino acid | Uptake | T168_FvePUP3_37 | From | Fragaria vesca |
| NO: 571 | sequence of | Transporter | | | subsp. vesca |
| SEQ ID | DNA coding | Uptake | T168_FvePUP3_37 | From | Fragaria vesca |
| NO: 572 | sequence of | Transporter | | | subsp. vesca |
| SEQ ID | Amino acid | Uptake | T169_ZjuPUP3_45 | From | Ziziphus jujuba |
| NO: 573 | sequence of | Transporter | | | |
| SEQ ID | DNA coding | Uptake | T169_ZjuPUP3_45 | From | Ziziphus jujuba |
| NO: 574 | sequence of | Transporter | | | |
| SEQ ID | Amino acid | Uptake | T170_LsaPUP3_53 | From | Lactuca sativa |
| NO: 575 | sequence of | Transporter | | | |
| SEQ ID | DNA coding | Uptake | T170_LsaPUP3_53 | From | Lactuca sativa |
| NO: 576 | sequence of | Transporter | | | |
| SEQ ID | Amino acid | Uptake | T171_McoPUP3_61 | From | Macleaya cordata |
| NO: 577 | sequence of | Transporter | | | |
| SEQ ID | DNA coding | Uptake | T171_McoPUP3_61 | From | Macleaya cordata |
| NO: 578 | sequence of | Transporter | | | |
| SEQ ID | Amino acid | Uptake | T172_AcoPUP3_69 | From | Aquilegia coerulea |
| NO: 579 | sequence of | Transporter | | | |
| SEQ ID | DNA coding | Uptake | T172_AcoPUP3_69 | From | Aquilegia coerulea |
| NO: 580 | sequence of | Transporter | | | |
| SEQ ID | Amino acid | Uptake | T173_PnuPUP3_77 | From | Papaver nudicale |
| NO: 581 | sequence of | Transporter | | | |
| SEQ ID | DNA coding | Uptake | T173_PnuPUP3_77 | From | Papaver nudicale |
| NO: 582 | sequence of | Transporter | | | |
| SEQ ID | Amino acid | Uptake | T174_PbrPUP3_85 | From | Papaver |
| NO: 583 | sequence of | Transporter | | | bracteatum |
| SEQ ID | DNA coding | Uptake | T174_PbrPUP3_85 | From | Papaver |
| NO: 584 | sequence of | Transporter | | | bracteatum |
| SEQ ID | Amino acid | Uptake | T175_PsoPUP3_6 | From | Papaver |
| NO: 585 | sequence of | Transporter | | | somniferum |
| SEQ ID | DNA coding | Uptake | T175_PsoPUP3_6 | From | Papaver |
| NO: 586 | sequence of | Transporter | | | somniferum |
| SEQ ID | Amino acid | Uptake | T176_AcoPUP3_14 | From | Aquilegia coerulea |
| NO: 587 | sequence of | Transporter | | | |
| SEQ ID | DNA coding | Uptake | T176_AcoPUP3_14 | From | Aquilegia coerulea |
| NO: 588 | sequence of | Transporter | | | |
| SEQ ID | Amino acid | Uptake | T177_PsoPUP3_22 | From | Papaver |
| NO: 589 | sequence of | Transporter | | | somniferum |
| SEQ ID | DNA coding | Uptake | T177_PsoPUP3_22 | From | Papaver |
| NO: 590 | sequence of | Transporter | | | somniferum |
| SEQ ID | Amino acid | Uptake | T178_PsoPUP3_30 | From | Papaver |
| NO: 591 | sequence of | Transporter | | | somniferum |
| SEQ ID | DNA coding | Uptake | T178_PsoPUP3_30 | From | Papaver |
| NO: 592 | sequence of | Transporter | | | somniferum |
| SEQ ID | Amino acid | Uptake | T179_PyePUP3_38 | From | Prunus yedoensis |
| NO: 593 | sequence of | Transporter | | | var. nudiflora |
| SEQ ID | DNA coding | Uptake | T179_PyePUP3_38 | From | Prunus yedoensis |
| NO: 594 | sequence of | Transporter | | | var. nudiflora |
| SEQ ID | Amino acid | Uptake | T180_McoPUP3_46 | From | Macleaya cordata |
| NO: 595 | sequence of | Transporter | | | |
| SEQ ID | DNA coding | Uptake | T180_McoPUP3_46 | From | Macleaya cordata |
| NO: 596 | sequence of | Transporter | | | |
| SEQ ID | Amino acid | Uptake | T181_HanPUP3_54 | From | Helianthus annuus |
| NO: 597 | sequence of | Transporter | | | |
| SEQ ID | DNA coding | Uptake | T181_HanPUP3_54 | From | Helianthus annuus |
| NO: 598 | sequence of | Transporter | | | |
| SEQ ID | Amino acid | Uptake | T182_CpaPUP3_62 | From | Carica papaya |
| NO: 599 | sequence of | Transporter | | | |
| SEQ ID | DNA coding | Uptake | T182_CpaPUP3_62 | From | Carica papaya |
| NO: 600 | sequence of | Transporter | | | |
| SEQ ID | Amino acid | Uptake | T184_PraPUP3_79 | From | Papaver radicatum |
| NO: 601 | sequence of | Transporter | | | |
| SEQ ID | DNA coding | Uptake | T184_PraPUP3_79 | From | Papaver radicatum |
| NO: 602 | sequence of | Transporter | | | |
| SEQ ID | Amino acid | Uptake | T186_ScaPUP3_84 | From | Sanguinaria |
| NO: 603 | sequence of | Transporter | | | canadensis |
| SEQ ID | DNA coding | Uptake | T186_ScaPUP3_84 | From | Sanguinaria |
| NO: 604 | sequence of | Transporter | | | canadensis |
| SEQ ID | Amino acid | Uptake | T188_AcoPUP3_15 | From | Aquilegia coerulea |
| NO: 605 | sequence of | Transporter | | | |
| SEQ ID | DNA coding | Uptake | T188_AcoPUP3_15 | From | Aquilegia coerulea |
| NO: 606 | sequence of | Transporter | | | |
| SEQ ID | Amino acid | Uptake | T189_PsoPUP3_23 | From | Papaver |
| NO: 607 | sequence of | Transporter | | | somniferum |
| SEQ ID | DNA coding | Uptake | T189_PsoPUP3_23 | From | Papaver |
| NO: 608 | sequence of | Transporter | | | somniferum |
| SEQ ID | Amino acid | Uptake | T191_MdoPUP3_39 | From | Malus domestica |
| NO: 609 | sequence of | Transporter | | | |
| SEQ ID | DNA coding | Uptake | T191_MdoPUP3_39 | From | Malus domestica |
| NO: 610 | sequence of | Transporter | | | |
| SEQ ID | Amino acid | Uptake | T192_CmiPUP3_47 | From | Cinnamomum |
| NO: 611 | sequence of | Transporter | | | micranthum |
| | | | | | f. kanehirae |
| SEQ ID | DNA coding | Uptake | T192_CmiPUP3_47 | From | Cinnamomum |
| NO: 612 | sequence of | Transporter | | | micranthum |
| | | | | | f. kanehirae |
| SEQ ID | Amino acid | Uptake | T193_AanPUP3_55 | From | Artemisia annua |
| NO: 613 | sequence of | Transporter | | | |
| SEQ ID | DNA coding | Uptake | T193_AanPUP3_55 | From | Artemisia annua |
| NO: 614 | sequence of | Transporter | | | |
| SEQ ID | Amino acid | Uptake | T194_CchPUP3_63 | From | Capsicum chinense |
| NO: 615 | sequence of | Transporter | | | |
| SEQ ID | DNA coding | Uptake | T194_CchPUP3_63 | From | Capsicum chinense |
| NO: 616 | sequence of | Transporter | | | |
| SEQ ID | Amino acid | Uptake | T195_JcuPUP3_71 | From | Jatropha curcas |
| NO: 617 | sequence of | Transporter | | | |
| SEQ ID | DNA coding | Uptake | T195_JcuPUP3_71 | From | Jatropha curcas |
| NO: 618 | sequence of | Transporter | | | |
| SEQ ID | Amino acid | Uptake | T196_PtrPUP3_80 | From | Papaver trinifolium |
| NO: 619 | sequence of | Transporter | | | |
| SEQ ID | DNA coding | Uptake | T196_PtrPUP3_80 | From | Papaver trinifolium |
| NO: 620 | sequence of | Transporter | | | |
| SEQ ID | Amino acid | Uptake | T197_AcoT97_GA | From | Aquilegia coerulea |
| NO: 621 | sequence of | Transporter | | | |
| SEQ ID | DNA coding | Uptake | T197_AcoT97_GA | From | Aquilegia coerulea |
| NO: 622 | sequence of | Transporter | | | |
| SEQ ID | Amino acid | Uptake | T198_AcoT97_GA | From | Aquilegia coerulea |
| NO: 623 | sequence of | Transporter | | | |
| SEQ ID | DNA coding | Uptake | T198_AcoT97_GA | From | Aquilegia coerulea |
| NO: 624 | sequence of | Transporter | | | |
| SEQ ID | Amino acid | Uptake | T199_NnuT97_GA | From | Nelumbo nucifera |
| NO: 625 | sequence of | Transporter | | | |
| SEQ ID | DNA coding | Uptake | T199_NnuT97_GA | From | Nelumbo nucifera |
| NO: 626 | sequence of | Transporter | | | |
| SEQ ID | Amino acid | Uptake | T200_T97_GA | From | Prunus yedoensis |
| NO: 627 | sequence of | Transporter | | | var. nudiflora |
| SEQ ID | DNA coding | Uptake | T200_T97_GA | From | Prunus yedoensis |
| NO: 628 | sequence of | Transporter | | | var. nudiflora |
| SEQ ID | Amino acid | Uptake | T201_HarPUP3_GA | From | Helicoverpa |
| NO: 629 | sequence of | Transporter | | | armigera |
| SEQ ID | DNA coding | Uptake | T201_HarPUP3_GA | From | Helicoverpa |
| NO: 630 | sequence of | Transporter | | | armigera |
| SEQ ID | Amino acid | Uptake | T202_PgoPUP3_GA | From | Pectinophora |
| NO: 631 | sequence of | Transporter | | | gossypiella |
| SEQ ID | DNA coding | Uptake | T202_PgoPUP3_GA | From | Pectinophora |
| NO: 632 | sequence of | Transporter | | | gossypiella |
| SEQ ID | Amino acid | Uptake | T203_HarPUP3_GA | From | Helicoverpa |
| NO: 633 | sequence of | Transporter | | | armigera |
| SEQ ID | DNA coding | Uptake | T203_HarPUP3_GA | From | Helicoverpa |
| NO: 634 | sequence of | Transporter | | | armigera |
| SEQ ID | Amino acid | Uptake | T204_RcoPUP3_GA | From | Ricinus communis |
| NO: 635 | sequence of | Transporter | | | |
| SEQ ID | DNA coding | Uptake | T204_RcoPUP3_GA | From | Ricinus communis |
| NO: 636 | sequence of | Transporter | | | |
| SEQ ID | Amino acid | Uptake | T205_HviPUP3_GA | From | Heliothis virescens |
| NO: 637 | sequence of | Transporter | | | |
| SEQ ID | DNA coding | Uptake | T205_HviPUP3_GA | From | Heliothis virescens |
| NO: 638 | sequence of | Transporter | | | |
| SEQ ID | Amino acid | Uptake | T206_VviPUP3_3_GA | From | Vitis vinifera |
| NO: 639 | sequence of | Transporter | | | |
| SEQ ID | DNA coding | Uptake | T206_VviPUP3_3_GA | From | Vitis vinifera |
| NO: 640 | sequence of | Transporter | | | |
| SEQ ID | Amino acid | Uptake | T207_MprPUP3_GA | From | Mucuna pruriens |
| NO: 641 | sequence of | Transporter | | | |
| SEQ ID | DNA coding | Uptake | T207_MprPUP3_GA | From | Mucuna pruriens |
| NO: 642 | sequence of | Transporter | | | |
| SEQ ID | Amino acid | Uptake | T208_McoPUP3_GA | From | Macleaya cordata |
| NO: 643 | sequence of | Transporter | | | |
| SEQ ID | DNA coding | Uptake | T208_McoPUP3_GA | From | Macleaya cordata |
| NO: 644 | sequence of | Transporter | | | |
| SEQ ID | Amino acid | Uptake | T209_RcoPUP3_GA | From | Ricinus communis |
| NO: 645 | sequence of | Transporter | | | |
| SEQ ID | DNA coding | Uptake | T209_RcoPUP3_GA | From | Ricinus communis |
| NO: 646 | sequence of | Transporter | | | |
| SEQ ID | Amino acid | Uptake | T210_NnuPUP3_GA | From | Nelumbo nucifera |
| NO: 647 | sequence of | Transporter | | | |
| SEQ ID | DNA coding | Uptake | T210_NnuPUP3_GA | From | Nelumbo nucifera |
| NO: 648 | sequence of | Transporter | | | |
| SEQ ID | Amino acid | Uptake | T211_HarPUP3_GA | From | Helicoverpa |
| NO: 649 | sequence of | Transporter | | | armigera |
| SEQ ID | DNA coding | Uptake | T211_HarPUP3_GA | From | Helicoverpa |
| NO: 650 | sequence of | Transporter | | | armigera |
| SEQ ID | Amino acid | Uptake | T212_HarPUP3_GA | From | Helicoverpa |
| NO: 651 | sequence of | Transporter | | | armigera |
| SEQ ID | DNA coding | Uptake | T212_HarPUP3_GA | From | Helicoverpa |
| NO: 652 | sequence of | Transporter | | | armigera |
| SEQ ID | Amino acid | Uptake | T213_HarPUP3_GA | From | Helicoverpa |
| NO: 653 | sequence of | Transporter | | | armigera |
| SEQ ID | DNA coding | Uptake | T213_HarPUP3_GA | From | Helicoverpa |
| NO: 654 | sequence of | Transporter | | | armigera |
| SEQ ID | Amino acid | Uptake | T214_HarPUP3_GA | From | Helicoverpa |
| NO: 655 | sequence of | Transporter | | | armigera |
| SEQ ID | DNA coding | Uptake | T214 HarPUP3_GA | From | Helicoverpa |
| NO: 656 | sequence of | Transporter | | | armigera |
| SEQ ID | Amino acid | Uptake | T215_HarPUP3_GA | From | Helicoverpa |
| NO: 657 | sequence of | Transporter | | | armigera |
| SEQ ID | DNA coding | Uptake | T215_HarPUP3_GA | From | Helicoverpa |
| NO: 658 | sequence of | Transporter | | | armigera |
| SEQ ID | Amino acid | Uptake | T216_HarPUP3_GA | From | Helicoverpa |
| NO: 659 | sequence of | Transporter | | | armigera |
| SEQ ID | DNA coding | Uptake | T216_HarPUP3_GA | From | Helicoverpa |
| NO: 660 | sequence of | Transporter | | | armigera |
| SEQ ID | Amino acid | Uptake | T217_AcoPUP3_GA | From | Aquilegia coerulea |
| NO: 661 | sequence of | Transporter | | | |
| SEQ ID | DNA coding | Uptake | T217_AcoPUP3_GA | From | Aquilegia coerulea |
| NO: 662 | sequence of | Transporter | | | |
| SEQ ID | Amino acid | Uptake | T65_ljaNPF_GA | From | Lonicera japonica |
| NO: 733 | sequence of | Transporter | | | |
| SEQ ID | DNA coding | Uptake | T65_ljaNPF_GA | From | Lonicera japonica |
| NO: 734 | sequence of | Transporter | | | |
| SEQ ID | Amino acid | Uptake | T94_EcrPOT_GA | From | Emmonsia |
| NO: 735 | sequence of | Transporter | | | crescens |
| SEQ ID | DNA coding | Uptake | T94_EcrPOT_GA | From | Emmonsia |
| NO: 736 | sequence of | Transporter | | | crescens |
| SEQ ID | Amino acid | ADH5 | ADH5 | From | Saccharomyces |
| NO: 663 | sequence of | Dehydrogenase | Dehydrogenase | | cerevisiae |
| SEQ ID | DNA coding | ADH5 | ADH5 | From | Saccharomyces |
| NO: 664 | sequence of | Dehydrogenase | Dehydrogenase | | cerevisiae |
| SEQ ID | Amino acid | ADH6 | ADH6 | From | Saccharomyces |
| NO: 665 | sequence of | Dehydrogenase | Dehydrogenase | | cerevisiae |
| SEQ ID | DNA coding | ADH6 | ADH6 | From | Saccharomyces |
| NO: 666 | sequence of | Dehydrogenase | Dehydrogenase | | cerevisiae |
| SEQ ID | Amino acid | ADH7 | ADH7 | From | Saccharomyces |
| NO: 667 | sequence of | Dehydrogenase | Dehydrogenase | | cerevisiae |
| SEQ ID | DNA coding | ADH7 | ADH7 | From | Saccharomyces |
| NO: 668 | sequence of | Dehydrogenase | Dehydrogenase | | cerevisiae |
| SEQ ID | Amino acid | YPR127W | YPR127W | From | Saccharomyces |
| NO: 669 | sequence of | Dehydrogenase | Dehydrogenase | | cerevisiae |
| SEQ ID | DNA coding | YPR127W | YPR127W | From | Saccharomyces |
| NO: 670 | sequence of | Dehydrogenase | Dehydrogenase | | cerevisiae |
| SEQ ID | Amino acid | AAD3 | AAD3 | From | Saccharomyces |
| NO: 671 | sequence of | Dehydrogenase | Dehydrogenase | | cerevisiae |
| SEQ ID | DNA coding | AAD3 | AAD3 | From | Saccharomyces |
| NO: 672 | sequence of | Dehydrogenase | Dehydrogenase | | cerevisiae |
| SEQ ID | Amino acid | AAD4 | AAD4 | From | Saccharomyces |
| NO: 673 | sequence of | Dehydrogenase | Dehydrogenase | | cerevisiae |
| SEQ ID | DNA coding | AAD4 | AAD4 | From | Saccharomyces |
| NO: 674 | sequence of | Dehydrogenase | Dehydrogenase | | cerevisiae |
| SEQ ID | Amino acid | ADH3 | ADH3 | From | Saccharomyces |
| NO: 675 | sequence of | Dehydrogenase | Dehydrogenase | | cerevisiae |
| SEQ ID | DNA coding | ADH3 | ADH3 | From | Saccharomyces |
| NO: 676 | sequence of | Dehydrogenase | Dehydrogenase | | cerevisiae |
| SEQ ID | Amino acid | ADH4 | ADH4 | From | Saccharomyces |
| NO: 677 | sequence of | Dehydrogenase | Dehydrogenase | | cerevisiae |
| SEQ ID | DNA coding | ADH4 | ADH4 | From | Saccharomyces |
| NO: 678 | sequence of | Dehydrogenase | Dehydrogenase | | cerevisiae |
| SEQ ID | Amino acid | ALD6 | ALD6 | From | Saccharomyces |
| NO: 679 | sequence of | Dehydrogenase | Dehydrogenase | | cerevisiae |
| SEQ ID | DNA coding | ALD6 | ALD6 | From | Saccharomyces |
| NO: 680 | sequence of | Dehydrogenase | Dehydrogenase | | cerevisiae |
| SEQ ID | Amino acid | BDH1 | BDH1 | From | Saccharomyces |
| NO: 681 | sequence of | Dehydrogenase | Dehydrogenase | | cerevisiae |
| SEQ ID | DNA coding | BDH1 | BDH1 | From | Saccharomyces |
| NO: 682 | sequence of | Dehydrogenase | Dehydrogenase | | cerevisiae |
| SEQ ID | Amino acid | BDH2 | BDH2 | From | Saccharomyces |
| NO: 683 | sequence of | Dehydrogenase | Dehydrogenase | | cerevisiae |
| SEQ ID | DNA coding | BDH2 | BDH2 | From | Saccharomyces |
| NO: 684 | sequence of | Dehydrogenase | Dehydrogenase | | cerevisiae |
| SEQ ID | Amino acid | FOX2 | FOX2 | From | Saccharomyces |
| NO: 685 | sequence of | Dehydrogenase | Dehydrogenase | | cerevisiae |
| SEQ ID | DNA coding | FOX2 | FOX2 | From | Saccharomyces |
| NO: 686 | sequence of | Dehydrogenase | Dehydrogenase | | cerevisiae |
| SEQ ID | Amino acid | GCY1 | GCY1 | From | Saccharomyces |
| NO: 687 | sequence of | Dehydrogenase | Dehydrogenase | | cerevisiae |
| SEQ ID | DNA coding | GCY1 | GCY1 | From | Saccharomyces |
| NO: 688 | sequence of | Dehydrogenase | Dehydrogenase | | cerevisiae |
| SEQ ID | Amino acid | GPD1 | GPD1 | From | Saccharomyces |
| NO: 689 | sequence of | Dehydrogenase | Dehydrogenase | | cerevisiae |
| SEQ ID | DNA coding | GPD1 | GPD1 | From | Saccharomyces |
| NO: 690 | sequence of | Dehydrogenase | Dehydrogenase | | cerevisiae |
| SEQ ID | Amino acid | HIS4 | HIS4 Dehydrogenase | From | Saccharomyces |
| NO: 691 | sequence of | Dehydrogenase | | | cerevisiae |
| SEQ ID | DNA coding | HIS4 | HIS4 Dehydrogenase | From | Saccharomyces |
| NO: 692 | sequence of | Dehydrogenase | | | cerevisiae |
| SEQ ID | Amino acid | IPD1 | IPD1 Dehydrogenase | From | Saccharomyces |
| NO: 693 | sequence of | Dehydrogenase | | | cerevisiae |
| SEQ ID | DNA coding | IPD1 | IPD1 Dehydrogenase | From | Saccharomyces |
| NO: 694 | sequence of | Dehydrogenase | | | cerevisiae |
| SEQ ID | Amino acid | LYS12 | LYS12 | From | Saccharomyces |
| NO: 695 | sequence of | Dehydrogenase | Dehydrogenase | | cerevisiae |
| SEQ ID | DNA coding | LYS12 | LYS12 | From | Saccharomyces |
| NO: 696 | sequence of | Dehydrogenase | Dehydrogenase | | cerevisiae |
| SEQ ID | Amino acid | SER33 | SER33 | From | Saccharomyces |
| NO: 697 | sequence of | Dehydrogenase | Dehydrogenase | | cerevisiae |
| SEQ ID | DNA coding | SER33 | SER33 | From | Saccharomyces |
| NO: 698 | sequence of | Dehydrogenase | Dehydrogenase | | cerevisiae |
| SEQ ID | Amino acid | ZWF1 | ZWF1 | From | Saccharomyces |
| NO: 699 | sequence of | Dehydrogenase | Dehydrogenase | | cerevisiae |
| SEQ ID | DNA coding | ZWF1 | ZWF1 | From | Saccharomyces |
| NO: 700 | sequence of | Dehydrogenase | Dehydrogenase | | cerevisiae |
| SEQ ID | Amino acid | YPL088W | YPL088W | From | Saccharomyces |
| NO: 701 | sequence of | Dehydrogenase | Dehydrogenase | | cerevisiae |
| SEQ ID | DNA coding | YPL088W | YPL088W | From | Saccharomyces |
| NO: 702 | sequence of | Dehydrogenase | Dehydrogenase | | cerevisiae |
| SEQ ID | Amino acid | ARA1 | ARA1 | From | Saccharomyces |
| NO: 703 | sequence of | Dehydrogenase | Dehydrogenase | | cerevisiae |
| SEQ ID | DNA coding | ARA1 | ARA1 | From | Saccharomyces |
| NO: 704 | sequence of | Dehydrogenase | Dehydrogenase | | cerevisiae |
| SEQ ID | Amino acid | HFD1 | HFD1 | From | Saccharomyces |
| NO: 705 | sequence of | Dehydrogenase | Dehydrogenase | | cerevisiae |
| SEQ ID | DNA coding | HFD1 | HFD1 | From | Saccharomyces |
| NO: 706 | sequence of | Dehydrogenase | Dehydrogenase | | cerevisiae |
| SEQ ID | Amino acid | YPR1 | YPR1 Reductase | From | Saccharomyces |
| NO: 707 | sequence of | Reductase | | | cerevisiae |
| SEQ ID | DNA coding | YPR1 | YPR1 Reductase | From | Saccharomyces |
| NO: 708 | sequence of | Reductase | | | cerevisiae |
| SEQ ID | Amino acid | ALD4 | ALD4 Reductase | From | Saccharomyces |
| NO: 709 | sequence of | Reductase | | | cerevisiae |
| SEQ ID | DNA coding | ALD4 | ALD4 Reductase | From | Saccharomyces |
| NO: 710 | sequence of | Reductase | | | cerevisiae |
| SEQ ID | Amino acid | GOR1 | GOR1 Reductase | From | Saccharomyces |
| NO: 711 | sequence of | Reductase | | | cerevisiae |
| SEQ ID | DNA coding | GOR1 | GOR1 Reductase | From | Saccharomyces |
| NO: 712 | sequence of | Reductase | | | cerevisiae |
| SEQ ID | Amino acid | GRE2 | GRE2 Reductase | From | Saccharomyces |
| NO: 713 | sequence of | Reductase | | | cerevisiae |
| SEQ ID | DNA coding | GRE2 | GRE2 Reductase | From | Saccharomyces |
| NO: 714 | sequence of | Reductase | | | cerevisiae |
| SEQ ID | Amino acid | GRE3 | GRE3 Reductase | From | Saccharomyces |
| NO: 715 | sequence of | Reductase | | | cerevisiae |
| SEQ ID | DNA coding | GRE3 | GRE3 Reductase | From | Saccharomyces |
| NO: 716 | sequence of | Reductase | | | cerevisiae |
| SEQ ID | Amino acid | YDR541C | YDR541C Reductase | From | Saccharomyces |
| NO: 717 | sequence of | Reductase | | | cerevisiae |
| SEQ ID | DNA coding | YDR541C | YDR541C Reductase | From | Saccharomyces |
| NO: 718 | sequence of | Reductase | | | cerevisiae |
| SEQ ID | Amino acid | YLR460C | YLR460C Reductase | From | Saccharomyces |
| NO: 719 | sequence of | Reductase | | | cerevisiae |
| SEQ ID | DNA coding | YLR460C | YLR460C Reductase | From | Saccharomyces |
| NO: 720 | sequence of | Reductase | | | cerevisiae |
| SEQ ID | Amino acid | ARI1 | ARI1 Reductase | From | Saccharomyces |
| NO: 721 | sequence of | Reductase | | | cerevisiae |
| SEQ ID | DNA coding | ARI1 | ARI1 Reductase | From | Saccharomyces |
| NO: 722 | sequence of | Reductase | | | cerevisiae |
| SEQ ID | Amino acid | YGL039W | YGL039W Reductase | From | Saccharomyces |
| NO: 723 | sequence of | Reductase | | | cerevisiae |
| SEQ ID | DNA coding | YGL039W | YGL039W Reductase | From | Saccharomyces |
| NO: 724 | sequence of | Reductase | | | cerevisiae |
| SEQ ID | Amino acid | YCR102C | YCR102C Reductase | From | Saccharomyces |
| NO: 725 | sequence of | Reductase | | | cerevisiae |
| SEQ ID | DNA coding | YCR102C | YCR102C Reductase | From | Saccharomyces |
| NO: 726 | sequence of | Reductase | | | cerevisiae |
| SEQ ID | Amino acid | HMG1 | HMG1 Reductase | From | Saccharomyces |
| NO: 727 | sequence of | Reductase | | | cerevisiae |
| SEQ ID | DNA coding | HMG1 | HMG1 Reductase | From | Saccharomyces |
| NO: 728 | sequence of | Reductase | | | cerevisiae |
| SEQ ID | Amino acid | PHA2 | PHA2 Dehydratase | From | Saccharomyces |
| NO: 729 | sequence of | Dehydratase | | | cerevisiae |
| SEQ ID | DNA coding | PHA2 | PHA2 Dehydratase | From | Saccharomyces |
| NO: 730 | sequence of | Dehydratase | | | cerevisiae |
| SEQ ID | Amino acid | TRP3 | TRP3 Synthase | From | Saccharomyces |
| NO: 731 | sequence of | Synthase | | | cerevisiae |
| SEQ ID | DNA coding | TRP3 | TRP3 Synthase | From | Saccharomyces |
| NO: 732 | sequence of | Synthase | | | cerevisiae |
| SEQ ID | DNA coding | HEME | HEM2 | From | Saccharomyces |
| NO: 737 | sequence of | cofactor | | | cerevisiae |
| SEQ ID | Amino acid | HEME | HEM2 | From | Saccharomyces |
| NO: 738 | sequence of | cofactor | | | cerevisiae |
| SEQ ID | DNA coding | HEME | HEM3 | From | Saccharomyces |
| NO: 739 | sequence of | cofactor | | | cerevisiae |
| SEQ ID | Amino acid | HEME | HEM3 | From | Saccharomyces |
| NO: 740 | sequence of | cofactor | | | cerevisiae |
| SEQ ID | DNA coding | HEME | HEM12 | From | Saccharomyces |
| NO: 741 | sequence of | cofactor | | | cerevisiae |
| SEQ ID | Amino acid | HEME | HEM12 | From | Saccharomyces |
| NO: 742 | sequence of | cofactor | | | cerevisiae |
| SEQ ID | DNA coding | HEME | HMX1 | From | Saccharomyces |
| NO: 743 | sequence of | cofactor | | | cerevisiae |
| SEQ ID | Amino acid | HEME | HMX1 | From | Saccharomyces |
| NO: 744 | sequence of | cofactor | | | cerevisiae |
| SEQ ID | DNA coding | P450 | KAR2 | From | Saccharomyces |
| NO: 745 | sequence of | chaperone | | | cerevisiae |
| SEQ ID | Amino acid | P450 | KAR2 | From | Saccharomyces |
| NO: 746 | sequence of | chaperone | | | cerevisiae |
| SEQ ID | DNA coding | P450 | HSP82 | From | Saccharomyces |
| NO: 747 | sequence of | chaperone | | | cerevisiae |
| SEQ ID | Amino acid | P450 | HSP82 | From | Saccharomyces |
| NO: 748 | sequence of | chaperone | | | cerevisiae |
| SEQ ID | DNA coding | P450 | CNE1 | From | Saccharomyces |
| NO: 749 | sequence of | chaperone | | | cerevisiae |
| SEQ ID | Amino acid | P450 | CNE1 | From | Saccharomyces |
| NO: 750 | sequence of | chaperone | | | cerevisiae |
| SEQ ID | DNA coding | P450 | SSA1 | From | Saccharomyces |
| NO: 751 | sequence of | chaperone | | | cerevisiae |
| SEQ ID | Amino acid | P450 | SSA1 | From | Saccharomyces |
| NO: 752 | sequence of | chaperone | | | cerevisiae |
| SEQ ID | DNA coding | P450 | CPR6 | From | Saccharomyces |
| NO: 753 | sequence of | chaperone | | | cerevisiae |
| SEQ ID | Amino acid | P450 | CPR6 | From | Saccharomyces |
| NO: 754 | sequence of | chaperone | | | cerevisiae |
| SEQ ID | DNA coding | P450 | FES1 | From | Saccharomyces |
| NO: 755 | sequence of | chaperone | | | cerevisiae |
| SEQ ID | Amino acid | P450 | FES1 | From | Saccharomyces |
| NO: 756 | sequence of | chaperone | | | cerevisiae |
| SEQ ID | DNA coding | P450 | HSP104 | From | Saccharomyces |
| NO: 757 | sequence of | chaperone | | | cerevisiae |
| SEQ ID | Amino acid | P450 | HSP104 | From | Saccharomyces |
| NO: 758 | sequence of | chaperone | | | cerevisiae |
| SEQ ID | DNA coding | P450 | STI1 | From | Saccharomyces |
| NO: 759 | sequence of | chaperone | | | cerevisiae |
| SEQ ID | Amino acid | P450 | STI1 | From | Saccharomyces |
| NO: 760 | sequence of | chaperone | | | cerevisiae |
| SEQ ID | DNA coding | P450 | DAP1 | From | Saccharomyces |
| NO: 761 | sequence of | regulator | | | cerevisiae |
| SEQ ID | Amino acid | P450 | DAP1 | From | Saccharomyces |
| NO: 762 | sequence of | regulator | | | cerevisiae |
| SEQ ID | DNA coding | P450 | HAC1 | From | Saccharomyces |
| NO: 763 | sequence of | regulator | | | cerevisiae |
| SEQ ID | Amino acid | P450 | HAC1 | From | Saccharomyces |
| NO: 764 | sequence of | regulator | | | cerevisiae |
| SEQ ID | DNA coding | NADPH | ZWF1 | From | Saccharomyces |
| NO: 765 | sequence of | cofactor | | | cerevisiae |
| SEQ ID | Amino acid | NADPH | ZWF1 | From | Saccharomyces |
| NO: 766 | sequence of | cofactor | | | cerevisiae |
| SEQ ID | DNA coding | NADPH | GND1 | From | Saccharomyces |
| NO: 767 | sequence of | cofactor | | | cerevisiae |
| SEQ ID | Amino acid | NADPH | GND1 | From | Saccharomyces |
| NO: 768 | sequence of | cofactor | | | cerevisiae |
| SEQ ID | DNA coding | formadehyde | SFA1 | From | Saccharomyces |
| NO: 769 | sequence of | toxicity | | | cerevisiae |
| | | regulator | | | |
| SEQ ID | Amino acid | formadehyde | SFA1 | From | Saccharomyces |
| NO: 770 | sequence of | toxicity | | | cerevisiae |
| | | regulator | | | |
| SEQ ID | DNA coding | P450 | — | From | Artificial |
| NO: 771 | sequence of | (demethylase) | | | |
| SEQ ID | Amino acid | P450 | — | From | Artificial |
| NO: 772 | sequence of | (demethylase) | | | |
| SEQ ID | DNA coding | Uptake | T149_AcPUP3_59_co2 | From | Artificial |
| NO: 773 | sequence of | transporter | | | |
| | | codon | | | |
| | | optimised | | | |
| SEQ ID | Amino acid | Uptake | T149_AcPUP3_59_co2 | From | Aquilegia coerulea |
| NO: 774 | sequence of | transporter | | | |
| SEQ ID | DNA coding | Uptake | T149_AcPUP3_59_co3 | From | Artificial |
| NO: 775 | sequence of | transporter | | | |
| | | codon | | | |
| | | optimised | | | |
| SEQ ID | Amino acid | Uptake | T149_AcPUP3_59_co3 | From | Aquilegia coerulea |
| NO: 776 | sequence of | transporter | | | |
| SEQ ID | DNA coding | Uptake | T149_AcPUP3_59_co4 | From | Artificial |
| NO: 777 | sequence of | transporter | | | |
| | | codon | | | |
| | | optimised | | | |
| SEQ ID | Amino acid | Uptake | T149_AcPUP3_59_co4 | From | Aquilegia coerulea |
| NO: 778 | sequence of | transporter | | | |
| | | transporter | | | |
| SEQ ID | DNA coding | Uptake | T180_McPUP3_46_co2 | From | Artificial |
| NO: 779 | sequence of | transporter | | | |
| | | transporter | | | |
| | | codon | | | |
| | | optimised | | | |
| SEQ ID | Amino acid | Uptake | T180_McPUP3_46_co2 | From | Momordica |
| NO: 780 | sequence of | transporter | | | charantia |
| SEQ ID | DNA coding | Uptake | T180_McPUP3_46_co3 | From | Artificial |
| NO: 781 | sequence of | transporter | | | |
| | | codon | | | |
| | | optimised | | | |
| SEQ ID | Amino acid | Uptake | T180_McPUP3_46_co3 | From | Momordica |
| NO: 782 | sequence of | transporter | | | charantia |
| SEQ ID | DNA coding | Uptake | T180_McPUP3_46_co4 | From | Artificial |
| NO: 783 | sequence of | transporter | | | |
| | | codon | | | |
| | | optimised | | | |
| SEQ ID | Amino acid | Uptake | T180_McPUP3_46_co4 | From | Momordica |
| NO: 784 | sequence of | transporter | | | charantia |
| SEQ ID | DNA coding | Uptake | T180_McPUP3_46_co6 | From | Artificial |
| NO: 785 | sequence of | transporter | | | |
| | | codon | | | |
| | | optimised | | | |
| SEQ ID | Amino acid | Uptake | T180_McPUP3_46_co6 | From | Momordica |
| NO: 786 | sequence of | transporter | | | charantia |
| SEQ ID | DNA coding | Uptake | T193_AanPUP3_55_co2 | From | Artificial |
| NO: 787 | sequence of | transporter | | | |
| | | codon | | | |
| | | optimised | | | |
| SEQ ID | Amino acid | Uptake | T193_AanPUP3_55_co2 | From | Artemisia annua |
| NO: 788 | sequence of | transporter | | | |
| SEQ ID | DNA coding | Uptake | T193_AanPUP3_55_co3 | From | Artificial |
| NO: 789 | sequence of | transporter | | | |
| | | codon | | | |
| | | optimised | | | |
| SEQ ID | Amino acid | Uptake | T193_AanPUP3_55_co3 | From | Artemisia annua |
| NO: 790 | sequence of | transporter | | | |
| SEQ ID | DNA coding | Uptake | T193_AanPUP3_55_co5 | From | Artificial |
| NO: 791 | sequence of | transporter | | | |
| | | codon | | | |
| | | optimised | | | |
| SEQ ID | Amino acid | Uptake | T193_AanPUP3_55_co5 | From | Artemisia annua |
| NO: 792 | sequence of | transporter | | | |
| SEQ ID | DNA coding | Uptake | T193_AanPUP3_55_co6 | From | Artificial |
| NO: 793 | sequence of | transporter | | | |
| | | codon | | | |
| | | optimised | | | |
| SEQ ID | Amino acid | Uptake | T193_AanPUP3_55_co6 | From | Artemisia annua |
| NO: 794 | sequence of | transporter | | | |
| SEQ ID | Amino acid | Uptake | T218_HviENT3_GA | From | Heliothis virescens |
| NO: 795 | sequence of | transporter | | | |
| SEQ ID | DNA coding | Uptake | T218_HviENT3_GA | From | Heliothis virescens |
| NO: 796 | sequence of | transporter | | | |
| SEQ ID | Amino acid | Uptake | T220_CsuENT3_GA | From | Chilo suppressalis |
| NO: 797 | sequence of | transporter | | | |
| SEQ ID | DNA coding | Uptake | T220_CsuENT3_GA | From | Chilo suppressalis |
| NO: 798 | sequence of | transporter | | | |
| SEQ ID | Amino acid | Uptake | T221_BmoENT3_GA | From | Bombyx mori |
| NO: 799 | sequence of | transporter | | | |
| SEQ ID | DNA coding | Uptake | T221_BmoENT3_GA | From | Bombyx mori |
| NO: 800 | sequence of | transporter | | | |
| SEQ ID | Amino acid | Uptake | T227_AcuENT3_GA | From | Anopheles |
| NO: 801 | sequence of | transporter | | | culicifacies |
| SEQ ID | DNA coding | Uptake | T227_AcuENT3_GA | From | Anopheles |
| NO: 802 | sequence of | transporter | | | culicifacies |
| SEQ ID | Amino acid | Uptake | T234_CsuENT3_GA | From | Chilo suppressalis |
| NO: 803 | sequence of | transporter | | | |
| SEQ ID | DNA coding | Uptake | T234_CsuENT3_GA | From | Chilo suppressalis |
| NO: 804 | sequence of | transporter | | | |
| SEQ ID | Amino acid | Uptake | T237_PxuENT3_GA | From | Papilio xuthus |
| NO: 805 | sequence of | transporter | | | |
| SEQ ID | DNA coding | Uptake | T237_PxuENT3_GA | From | Papilio xuthus |
| NO: 806 | sequence of | transporter | | | |
| SEQ ID | Amino acid | Uptake | T238_HviENT3_GA | From | Heliothis virescens |
| NO: 807 | sequence of | transporter | | | |
| SEQ ID | DNA coding | Uptake | T238_HviENT3_GA | From | Heliothis virescens |
| NO: 808 | sequence of | transporter | | | |
| SEQ ID | Amino acid | Uptake | T239_CmePUP3_GA | From | Cucumis melo var. |
| NO: 809 | sequence of | transporter | | | makuwa |
| SEQ ID | DNA coding | Uptake | T239_CmePUP3_GA | From | Cucumis melo var. |
| NO: 810 | sequence of | transporter | | | makuwa |
| SEQ ID | Amino acid | Uptake | T240_PpePUP3_GA | From | Prunus persica |
| NO: 811 | sequence of | transporter | | | |
| SEQ ID | DNA coding | Uptake | T240_PpePUP3_GA | From | Prunus persica |
| NO: 812 | sequence of | transporter | | | |
| SEQ ID | Amino acid | Uptake | T242_AchPUP3_GA | From | Actinidia chinensis |
| NO: 813 | sequence of | transporter | | | var. chinensis |
| SEQ ID | DNA coding | Uptake | T242_AchPUP3_GA | From | Actinidia chinensis |
| NO: 814 | sequence of | transporter | | | var. chinensis |
| SEQ ID | Amino acid | Uptake | T243_EguPUP3_GA | From | Erythranthe guttata |
| NO: 815 | sequence of | transporter | | | |
| SEQ ID | DNA coding | Uptake | T243_EguPUP3_GA | From | Erythranthe guttata |
| NO: 816 | sequence of | transporter | | | |
| SEQ ID | Amino acid | Uptake | T244_CcaPUP3_GA | From | Corchorus |
| NO: 817 | sequence of | transporter | | | capsularis |
| SEQ ID | DNA coding | Uptake | T244_CcaPUP3_GA | From | Corchorus |
| NO: 818 | sequence of | transporter | | | capsularis |
| SEQ ID | Amino acid | Uptake | T245_CcaPUP3_GA | From | Handroanthus |
| NO: 819 | sequence of | transporter | | | impetiginosus |
| SEQ ID | DNA coding | Uptake | T245_CcaPUP3_GA | From | Handroanthus |
| NO: 820 | sequence of | transporter | | | impetiginosus |
| SEQ ID | Amino acid | Uptake | T248_McoPUP3_GA | From | Macleaya cordata |
| NO: 821 | sequence of | transporter | | | |
| SEQ ID | DNA coding | Uptake | T248_McoPUP3_GA | From | Macleaya cordata |
| NO: 822 | sequence of | transporter | | | |
| SEQ ID | Amino acid | Uptake | T253_AanPUP3_GA | From | Artemisia annua |
| NO: 823 | sequence of | transporter | | | |
| SEQ ID | DNA coding | Uptake | T253_AanPUP3_GA | From | Artemisia annua |
| NO: 824 | sequence of | transporter | | | |
| SEQ ID | Amino acid | Uptake | T254_CcaPUP3_GA | From | Cynara |
| NO: 825 | sequence of | transporter | | | cardunculus var. |
| | | | | | scolymus |
| SEQ ID | DNA coding | Uptake | T254_CcaPUP3_GA | From | Cynara |
| NO: 826 | sequence of | transporter | | | cardunculus var. |
| | | | | | scolymus |
| SEQ ID | Amino acid | P450 | A0A286QUG7 | From | Spodoptera exigua |
| NO: 827 | sequence of | (demethylase) | | | |
| SEQ ID | DNA coding | P450 | A0A286QUG7 | From | Spodoptera exigua |
| NO: 828 | sequence of | (demethylase) | | | |
| SEQ ID | Amino acid | P450 | D5L0M5 | From | Manduca sexta |
| NO: 829 | sequence of | (demethylase) | | | |
| SEQ ID | DNA coding | P450 | D5L0M5 | From | Manduca sexta |
| NO: 830 | sequence of | (demethylase) | | | |
| SEQ ID | Amino acid | P450 | XP026740610 | From | Trichoplusia ni |
| NO: 831 | sequence of | (demethylase) | | | |
| SEQ ID | DNA coding | P450 | XP026740610 | From | Trichoplusia ni |
| NO: 832 | sequence of | (demethylase) | | | |
| SEQ ID | Amino acid | P450 | W5W4U7 | From | Lymantria dispar |
| NO: 833 | sequence of | (demethylase) | | | |
| SEQ ID | DNA coding | P450 | W5W4U7 | From | Lymantria dispar |
| NO: 834 | sequence of | (demethylase) | | | |
| SEQ ID | Amino acid | P450 | ACF17813 | From | Ostrinia furnacalis |
| NO: 835 | sequence of | (demethylase) | | | |
| SEQ ID | DNA coding | P450 | ACF17813 | From | Ostrinia furnacalis |
| NO: 836 | sequence of | (demethylase) | | | |
| SEQ ID | Amino acid | P450 | A0A4C1YMA7 | From | Eumeta variegata |
| NO: 837 | sequence of | (demethylase) | | | |
| SEQ ID | DNA coding | P450 | A0A4C1YMA7 | From | Eumeta variegata |
| NO: 838 | sequence of | (demethylase) | | | |
| SEQ ID | Amino acid | P450 | MsCPR_XP_030039194 | From | Manduca sexta |
| NO: 839 | sequence of | (demethylase) | | | |
| SEQ ID | DNA coding | P450 | MsCPR_XP_030039194 | From | Manduca sexta |
| NO: 840 | sequence of | (demethylase) | | | |
| SEQ ID | Amino acid | P450 | HvCPR_A0A2A4IYH3 | From | Heliothis virescens |
| NO: 841 | sequence of | (demethylase) | | | |
| SEQ ID | DNA coding | P450 | HvCPR_A0A2A4IYH3 | From | Heliothis virescens |
| NO: 842 | sequence of | (demethylase) | | | |
| SEQ ID | Amino acid | P450 | HaCYP6AE15v2_t | From | Helicoverpa |
| NO: 843 | sequence of | (demethylase) | | | armigera |
| SEQ ID | DNA coding | P450 | HaCYP6AE15v2_t | From | Helicoverpa |
| NO: 844 | sequence of | (demethylase) | | | armigera |
| SEQ ID | Amino acid | P450 | NMCH- | From | Helicoverpa |
| NO: 845 | sequence of | (demethylase) | HaCYP6AE15v2_t | | armigera |
| | | | (Amino acid 1-25 -> | | |
| | | | NMCH N-terminal | | |
| | | | signal peptide) | | |
| SEQ ID | DNA coding | P450 | NMCH- | From | Helicoverpa |
| NO: 846 | sequence of | (demethylase) | HaCYP6AE15v2_t | | armigera |
| SEQ ID | Amino acid | P450 | EcCFS-SP- | From | Helicoverpa |
| NO: 847 | sequence of | (demethylase) | HaCYP6AE15v2_t | | armigera |
| | | | (Amino acid 1-22 -> | | |
| | | | EcCFS N-terminal | | |
| | | | signal peptide) | | |
| SEQ ID | DNA coding | P450 | EcCFS-SP- | From | Helicoverpa |
| NO: 848 | sequence of | (demethylase) | HaCYP6AE15v2_t | | armigera |
| SEQ ID | Amino acid | P450 | HaCYP6AE15v2_A316G_t | From | Helicoverpa |
| NO: 849 | sequence of | (demethylase) | | | armigera |
| SEQ ID | DNA coding | P450 | HaCYP6AE15v2_A316G_t | From | Helicoverpa |
| NO: 850 | sequence of | (demethylase) | | | armigera |
| SEQ ID | Amino acid | P450 | NMCH- | From | Helicoverpa |
| NO: 851 | sequence of | (demethylase) | HaCYP6AE15v2_A316G_t | | armigera |
| | | | (Amino acid 1- | | |
| | | | 25 ->NMCH N- | | |
| | | | terminal signal | | |
| | | | peptide) | | |
| SEQ ID | DNA coding | P450 | NMCH- | From | Helicoverpa |
| NO: 852 | sequence of | (demethylase) | HaCYP6AE15v2_A316G_t | | armigera |
| SEQ ID | Amino acid | P450 | EcCFS-SP- | From | Helicoverpa |
| NO: 853 | sequence of | (demethylase) | HaCYP6AE15v2_A316G_t | | armigera |
| | | | (Amino acid 1- | | |
| | | | 22 -> EcCFS N- | | |
| | | | terminal signal | | |
| | | | peptide) | | |
| SEQ ID | DNA coding | P450 | EcCFS-SP- | From | Helicoverpa |
| NO: 854 | sequence of | (demethylase) | HaCYP6AE15v2_A316G_t | | armigera |
| SEQ ID | Amino acid | P450 | HaCYP6AE15v2_D392E_t | From | Helicoverpa |
| NO: 855 | sequence of | (demethylase) | | | armigera |
| SEQ ID | DNA coding | P450 | HaCYP6AE15v2_D392E_t | From | Helicoverpa |
| NO: 856 | sequence of | (demethylase) | | | armigera |
| SEQ ID | Amino acid | P450 | NMCH- | From | Helicoverpa |
| NO: 857 | sequence of | (demethylase) | HaCYP6AE15v2_D392E_t | | armigera |
| | | | (Amino acid 1- | | |
| | | | 25 -> NMCH N- | | |
| | | | terminal signal | | |
| | | | peptide) | | |
| SEQ ID | DNA coding | P450 | NMCH- | From | Helicoverpa |
| NO: 858 | sequence of | (demethylase) | HaCYP6AE15v2_D392E_t | | armigera |
| SEQ ID | Amino acid | P450 | EcCFS-SP- | From | Helicoverpa |
| NO: 859 | sequence of | (demethylase) | HaCYP6AE15v2_D392E_t | | armigera |
| | | | (Amino acid 1- | | |
| | | | 22 -> EcCFS N- | | |
| | | | terminal signal | | |
| | | | peptide) | | |
| SEQ ID | DNA coding | P450 | EcCFS-SP- | From | Helicoverpa |
| NO: 860 | sequence of | (demethylase) | HaCYP6AE15v2_D392E_t | | armigera |
| SEQ ID | Amino acid | P450 | Hv_CYP_A0A2A4JAM9_t | From | Heliothis virescens |
| NO:861 | sequence of | (demethylase) | | | |
| SEQ ID | DNA coding | P450 | Hv_CYP_A0A2A4JAM9_t | From | Heliothis virescens |
| NO: 862 | sequence of | (demethylase) | | | |
| SEQ ID | Amino acid | P450 | NMCH- | From | Heliothis virescens |
| NO: 863 | sequence of | (demethylase) | Hv_CYP_A0A2A4JAM9_t | | |
| | | | (Amino acid 1- | | |
| | | | 25 -> NMCH N- | | |
| | | | terminal signal | | |
| | | | peptide) | | |
| SEQ ID | DNA coding | P450 | NMCH- | From | Heliothis virescens |
| NO: 864 | sequence of | (demethylase) | Hv_CYP_A0A2A4JAM9_t | | |
| SEQ ID | Amino acid | P450 | EcCFS-SP- | From | Heliothis virescens |
| NO: 865 | sequence of | (demethylase) | Hv_CYP_A0A2A4JAM9_t | | |
| | | | (Amino acid 1- | | |
| | | | 22 -> EcCFS N- | | |
| | | | terminal signal | | |
| | | | peptide) | | |
| SEQ ID | DNA coding | P450 | EcCFS-SP- | From | Heliothis virescens |
| NO: 866 | sequence of | (demethylase) | Hv_CYP_A0A2A4JAM9_t | | |
| SEQ ID | Amino acid | P450 | EcCFS (CYP719A5) | From | Eschscholzia |
| NO: 867 | sequence of | (demethylase) | (Amino acid 1-22 -> | | californica |
| | | | N-terminal signal | | |
| | | | peptide) | | |
| SEQ ID | DNA coding | P450 | EcCFS (CYP719A5) | From | Eschscholzia |
| NO: 868 | sequence of | (demethylase) | | | californica |
| SEQ ID | Amino acid | P450 | EcNMCH (CYP80B2) | From | Eschscholzia |
| NO: 869 | sequence of | (demethylase) | (Amino acid 1-25 -> | | californica |
| | | | N-terminal signal | | |
| | | | peptide) | | |
| SEQ ID | DNA coding | P450 | EcNMCH (CYP80B2) | From | Eschscholzia |
| NO: 870 | sequence of | (demethylase) | | | californica |
| SEQ ID | DNA coding | Efflux | YOR1 | From | Saccharomyces |
| NO: 871 | sequence of | transporter | | | cerevisiae |
| SEQ ID | Amino acid | Efflux | YOR1 | From | Saccharomyces |
| NO: 872 | sequence of | transporter | | | cerevisiae |
| SEQ ID | DNA coding | O- | Ps_CODM | From | artificial |
| NO: 873 | sequence of | demethylase | | | |
| SEQ ID | Amino acid | O- | Ps_CODM | From | Papaver |
| NO: 874 | sequence of | demethylase | | | somniferum |
| SEQ ID | DNA coding | N- | — | From | artificial |
| NO: 875 | sequence of | demethylase | | | |
| SEQ ID | Amino acid | N- | — | From | artificial |
| NO: 876 | sequence of | demethylase | | | |
| SEQ ID | DNA coding | UGT | KAF3968553 | From | artificial |
| NO: 877 | sequence of | | | | |
| SEQ ID | Amino acid | UGT | KAF3968553 | From | Castanea |
| NO: 878 | sequence of | | | | mollissima |
| SEQ ID | DNA coding | UGT | Qs72S_1 | From | artificial |
| NO: 879 | sequence of | | | | |
| SEQ ID | Amino acid | UGT | Qs72S_1 | From | Quercus suber |
| NO: 880 | sequence of | | | | |
| SEQ ID | DNA coding | UGT | XP_023875154 | From | artificial |
| NO: 881 | sequence of | | | | |
| SEQ ID | Amino acid | UGT | XP_023875154 | From | Quercus suber |
| NO: 882 | sequence of | | | | |
| SEQ ID | DNA coding | UGT | XP_023914549 | From | artificial |
| NO: 883 | sequence of | | | | |
| SEQ ID | Amino acid | UGT | XP_023914549 | From | Quercus suber |
| NO: 884 | sequence of | | | | |
| SEQ ID | DNA coding | UGT | KAF3968554 | From | artificial |
| NO: 885 | sequence of | | | | |
| SEQ ID | Amino acid | UGT | KAF3968554 | From | Castanea |
| NO: 886 | sequence of | | | | mollissima |
| SEQ ID | DNA coding | UGT | XP_023905565 | From | artificial |
| NO: 887 | sequence of | | | | |
| SEQ ID | Amino acid | UGT | XP_023905565 | From | Quercus suber |
| NO: 888 | sequence of | | | | |
| SEQ ID | DNA coding | UGT | XP_030967178 | From | artificial |
| NO: 889 | sequence of | | | | |
| SEQ ID | Amino acid | UGT | XP_030967178 | From | Quercus lobata |
| NO: 890 | sequence of | | | | |
| SEQ ID | DNA coding | UGT | XP_023876282 | From | artificial |
| NO: 891 | sequence of | | | | |
| SEQ ID | Amino acid | UGT | XP_023876282 | From | Quercus suber |
| NO: 892 | sequence of | | | | |
| SEQ ID | DNA coding | UGT | XP_023876189 | From | artificial |
| NO: 893 | sequence of | | | | |
| SEQ ID | Amino acid | UGT | XP_023876189 | From | Quercus suber |
| NO: 894 | sequence of | | | | |
| SEQ ID | DNA coding | UGT | XP_023923919 | From | artificial |
| NO: 895 | sequence of | | | | |
| SEQ ID | Amino acid | UGT | XP_023923919 | From | Quercus suber |
| NO: 896 | sequence of | | | | |
| SEQ ID | DNA coding | UGT | KAB1219588 | From | artificial |
| NO: 897 | sequence of | | | | |
| SEQ ID | Amino acid | UGT | KAB1219588 | From | Morella rubra |
| NO: 898 | sequence of | | | | |
| SEQ ID | DNA coding | glycosyl | ScUGP1 | From | Saccharomyces |
| NO: 899 | sequence of | donor | | | cerevisiae |
| SEQ ID | Amino acid | glycosyl | ScUGP1 | From | Saccharomyces |
| NO: 900 | sequence of | donor | | | cerevisiae |
| SEQ ID | DNA coding | transcription | PDR1 | From | Saccharomyces |
| NO: 901 | sequence of | factor | | | cerevisiae |
| SEQ ID | Amino acid | transcription | PDR1 | From | Saccharomyces |
| NO: 902 | sequence of | factor | | | cerevisiae |
| SEQ ID | DNA coding | transcription | PDR3 | From | Saccharomyces |
| NO: 903 | sequence of | factor | | | cerevisiae |
| SEQ ID | Amino acid | transcription | PDR3 | From | Saccharomyces |
| NO: 904 | sequence of | factor | | | cerevisiae |
| SEQ ID | DNA coding | transcription | YRR1 | From | Saccharomyces |
| NO: 905 | sequence of | factor | | | cerevisiae |
| SEQ ID | Amino acid | transcription | YRR1 | From | Saccharomyces |
| NO: 906 | sequence of | factor | | | cerevisiae |
| SEQ ID | DNA coding | transcription | PDR8 | From | Saccharomyces |
| NO: 907 | sequence of | factor | | | cerevisiae |
| SEQ ID | Amino acid | transcription | PDR8 | From | Saccharomyces |
| NO: 908 | sequence of | factor | | | cerevisiae |
| SEQ ID | DNA coding | efflux | ET60 | From | artificial |
| NO: 909 | sequence of | transporter | | | |
| SEQ ID | Amino acid | efflux | ET60 | From | Debaryomyces |
| NO: 910 | sequence of | transporter | | | fabryi |
| SEQ ID | DNA coding | efflux | ET71 | From | artificial |
| NO: 911 | sequence of | transporter | | | |
| SEQ ID | Amino acid | efflux | ET71 | From | Wickerhamomyces |
| NO: 912 | sequence of | transporter | | | ciferrii |
| SEQ ID | DNA coding | efflux | ET58 | From | artificial |
| NO: 913 | sequence of | transporter | | | |
| SEQ ID | Amino acid | efflux | ET58 | From | Cyberlindnera |
| NO: 914 | sequence of | transporter | | | fabianii |
| SEQ ID | DNA coding | efflux | PDR5 | From | Saccharomyces |
| NO: 915 | sequence of | transporter | | | cerevisiae |
| SEQ ID | Amino acid | efflux | PDR5 | From | Saccharomyces |
| NO: 916 | sequence of | transporter | | | cerevisiae |
| SEQ ID | DNA coding | efflux | ET161 | From | artificial |
| NO: 917 | sequence of | transporter | | | |
| SEQ ID | Amino acid | efflux | ET161 | From | Mus musculus |
| NO: 918 | sequence of | transporter | | | |
| SEQ ID | DNA coding | efflux | ET63 | From | artificial |
| NO: 919 | sequence of | transporter | | | |
| SEQ ID | Amino acid | efflux | ET63 | From | Ogataea philodendri |
| NO: 920 | sequence of | transporter | | | |
| SEQ ID | DNA coding | efflux | ET170 | From | artificial |
| NO: 921 | sequence of | transporter | | | |
| SEQ ID | Amino acid | efflux | ET170 | From | Capra hircus |
| NO: 922 | sequence of | transporter | | | |
| SEQ ID | DNA coding | efflux | ET97 | From | artificial |
| NO: 923 | sequence of | transporter | | | |
| SEQ ID | Amino acid | efflux | ET97 | From | Cyanobium sp. |
| NO: 924 | sequence of | transporter | | | NIES-981 |
| SEQ ID | DNA coding | efflux | ET82 | From | artificial |
| NO: 925 | sequence of | transporter | | | |
| SEQ ID | Amino acid | efflux | ET82 | From | Cyberlindnera |
| NO: 926 | sequence of | transporter | | | jadinii NRRL |
| | | | | | Y-1542 |
| SEQ ID | DNA coding | efflux | ET81 | From | artificial |
| NO: 927 | sequence of | transporter | | | |
| SEQ ID | Amino acid | efflux | ET81 | From | Wickerhamomyces |
| NO: 928 | sequence of | transporter | | | mucosus |
| SEQ ID | DNA coding | efflux | ET83 | From | artificial |
| NO: 929 | sequence of | transporter | | | |
| SEQ ID | Amino acid | efflux | ET83 | From | Cyberlindnera |
| NO: 930 | sequence of | transporter | | | americana |
| SEQ ID | DNA coding | efflux | ET72 | From | artificial |
| NO: 931 | sequence of | transporter | | | |
| SEQ ID | Amino acid | efflux | ET72 | From | Ogataea |
| NO: 932 | sequence of | transporter | | | philodendri |
| SEQ ID | DNA coding | efflux | ET47 | From | artificial |
| NO: 933 | sequence of | transporter | | | |
| SEQ ID | Amino acid | efflux | ET47 | From | artificial |
| NO: 934 | sequence of | transporter | | | |
| SEQ ID | DNA coding | efflux | ET120 | From | artificial |
| NO: 935 | sequence of | transporter | | | |
| SEQ ID | Amino acid | efflux | ET120 | From | Lachancea |
| NO: 936 | sequence of | transporter | | | mirantina |
| SEQ ID | DNA coding | efflux | ET212 | From | artificial |
| NO: 937 | sequence of | transporter | | | |
| SEQ ID | Amino acid | efflux | ET212 | From | [Candida] auris |
| NO: 938 | sequence of | transporter | | | |
| SEQ ID | DNA coding | efflux | ET208 | From | artificial |
| NO: 939 | sequence of | transporter | | | |
| SEQ ID | Amino acid | efflux | ET208 | From | Kuraishia capsulata |
| NO: 940 | sequence of | transporter | | | CBS 1993 |
| SEQ ID | DNA coding | efflux | ET193 | From | artificial |
| NO: 941 | sequence of | transporter | | | |
| SEQ ID | Amino acid | efflux | ET193 | From | Scheffersomyces |
| NO: 942 | sequence of | transporter | | | stipitis CBS 6054 |
| SEQ ID | DNA coding | efflux | ET171 | From | artificial |
| NO: 943 | sequence of | transporter | | | |
| SEQ ID | Amino acid | efflux | ET171 | From | Capra hircus |
| NO: 944 | sequence of | transporter | | | |
| SEQ ID | DNA coding | efflux | ET168 | From | artificial |
| NO: 945 | sequence of | transporter | | | |
| SEQ ID | Amino acid | efflux | ET168 | From | Ovis aries |
| NO: 946 | sequence of | transporter | | | |
| SEQ ID | DNA coding | efflux | ET165 | From | artificial |
| NO: 947 | sequence of | transporter | | | |
| SEQ ID | Amino acid | efflux | ET165 | From | Mus musculus |
| NO: 948 | sequence of | transporter | | | |
| SEQ ID | DNA coding | efflux | ET160 | From | artificial |
| NO: 949 | sequence of | transporter | | | |
| SEQ ID | Amino acid | efflux | ET160 | From | Homo sapiens |
| NO: 950 | sequence of | transporter | | | |
| SEQ ID | DNA coding | Jefflux | ET158 | From | artificial |
| NO: 951 | sequence of | transporter | | | |
| SEQ ID | Amino acid | efflux | ET158 | From | Homo sapiens |
| NO: 952 | sequence of | transporter | | | |
| SEQ ID | DNA coding | efflux | ET159 | From | artificial |
| NO: 953 | sequence of | transporter | | | |
| SEQ ID | Amino acid | efflux | ET159 | From | Homo sapiens |
| NO: 954 | sequence of | transporter | | | |
| SEQ ID | DNA coding | efflux | ET319 | From | artificial |
| NO: 955 | sequence of | transporter | | | |
| SEQ ID | Amino acid | efflux | ET319 | From | Candida |
| NO: 956 | sequence of | transporter | | | oxycetoniae |
| SEQ ID | DNA coding | efflux | ET320 | From | artificial |
| NO: 957 | sequence of | transporter | | | |
| SEQ ID | Amino acid | efflux | ET320 | From | Hyphopichia |
| NO: 958 | sequence of | transporter | | | burtonii |
| SEQ ID | DNA coding | efflux | ET328 | From | artificial |
| NO: 959 | sequence of | transporter | | | |
| SEQ ID | Amino acid | efflux | ET328 | From | Candida |
| NO: 960 | sequence of | transporter | | | duobushaemulonis |
| SEQ ID | DNA coding | efflux | ET329 | From | artificial |
| NO: 961 | sequence | transporter | | | |
| SEQ ID | Amino acid | efflux | ET329 | From | Candida haemuloni |
| NO: 962 | sequence of | transporter | | | |
| SEQ ID | DNA coding | efflux | ET331 | From | artificial |
| NO: 963 | sequence | transporter | | | |
| SEQ ID | Amino acid | efflux | ET331 | From | Clavispora |
| NO: 964 | sequence of | transporter | | | lusitaniae |
| SEQ ID | DNA coding | efflux | ET332 | From | artificial |
| NO: 965 | sequence of | transporter | | | |
| SEQ ID | Amino acid | efflux | ET332 | From | Candida auris |
| NO: 966 | sequence of | transporter | | | |
| SEQ ID | DNA coding | efflux | ET325 | From | artificial |
| NO: 967 | sequence of | transporter | | | |
| SEQ ID | Amino acid | efflux | ET325 | From | Candida margitis |
| NO: 968 | sequence of | transporter | | | |
| SEQ ID | DNA coding | efflux | ET322 | From | artificial |
| NO: 969 | sequence of | transporter | | | |
| SEQ ID | Amino acid | efflux | ET322 | From | Candida theae |
| NO: 970 | sequence of | transporter | | | |
| SEQ ID | DNA coding | efflux | ET294 | From | artificial |
| NO: 971 | sequence of | transporter | | | |
| SEQ ID | Amino acid | efflux | ET294 | From | Lachancea |
| NO: 972 | sequence of | transporter | | | quebecensis |
| SEQ ID | DNA coding | efflux | ET283 | From | artificial |
| NO: 973 | sequence of | transporter | | | |
| SEQ ID | Amino acid | efflux | ET283 | From | Zygosaccharomyces |
| NO: 974 | sequence of | transporter | | | rouxii |
| SEQ ID | DNA coding | efflux | ET306 | From | artificial |
| NO: 975 | sequence o | transporter | | | |
| SEQ ID | Amino acid | efflux | ET306 | From | Cyberlindnera |
| NO: 976 | sequence of | transporter | | | fabianii |
| SEQ ID | DNA coding | efflux | ET305 | From | artificial |
| NO: 977 | sequence of | transporter | | | |
| SEQ ID | Amino acid | efflux | ET305 | | Wickerhamomyces |
| NO: 978 | sequence of | transporter | | | anomalus |
| SEQ ID | DNA coding | efflux | ET291 | From | artificial |
| NO: 979 | sequence of | transporter | | | |
| SEQ ID | Amino acid | efflux | ET291 | From | Lachancea |
| NO: 980 | sequence of | transporter | | | nothofagi |
| SEQ ID | DNA coding | efflux | ET281 | From | artificial |
| NO: 981 | sequence of | transporter | | | |
| SEQ ID | Amino acid | efflux | ET281 | From | Zygosaccharomyces |
| NO: 982 | sequence of | transporter | | | rouxii |
| SEQ ID | DNA coding | efflux | ET264 | From | artificial |
| NO: 983 | sequence of | transporter | | | |
| SEQ ID | Amino acid | efflux | ET264 | From | Naumovozyma |
| NO: 984 | sequence of | transporter | | | dairenensis |
| SEQ ID | DNA coding | efflux | ET304 | From | artificial |
| NO: 985 | sequence of | transporter | | | |
| SEQ ID | Amino acid | efflux | ET304 | From | Wickerhamomyces |
| NO: 986 | sequence of | transporter | | | ciferrii |
| SEQ ID | DNA coding | efflux | ET290 | From | artificial |
| NO: 987 | sequence of | transporter | | | |
| SEQ ID | Amino acid | efflux | ET290 | From | Lachancea |
| NO: 988 | sequence of | transporter | | | dasiensis |
| SEQ ID | DNA coding | efflux | ET289 | From | artificial |
| NO: 989 | sequence of | transporter | | | |
| SEQ ID | Amino acid | efflux | ET289 | From | Lachancea |
| NO: 990 | sequence of | transporter | | | meyersii |
| SEQ ID | DNA coding | efflux | ET316 | From | artificial |
| NO: 991 | sequence of | transporter | | | |
| SEQ ID | Amino acid | efflux | ET316 | From | Hanseniaspora |
| NO: 992 | sequence of | transporter | | | uvarum |
| SEQ ID | DNA coding | efflux | ET287 | From | artificial |
| NO: 993 | sequence of | transporter | | | |
| SEQ ID | Amino acid | efflux | ET287 | From | Lachancea |
| NO: 994 | sequence of | transporter | | | lanzarotensis |
| SEQ ID | DNA coding | efflux | ET273 | From | artificial |
| NO: 995 | sequence of | transporter | | | |
| SEQ ID | Amino acid | efflux | ET273 | From | Torulaspora |
| NO: 996 | sequence of | transporter | | | globosa |
| SEQ ID | DNA coding | efflux | ET312 | From | artificial |
| NO: 997 | sequence of | transporter | | | |
| SEQ ID | Amino acid | efflux | ET312 | From | Debaryomyces |
| NO: 998 | sequence of | transporter | | | hansenii |
| SEQ ID | DNA coding | efflux | ET300 | From | artificial |
| NO: 999 | sequence of | transporter | | | |
| SEQ ID | Amino acid: | efflux | ET300 | From | Kluyveromyces |
| NO: 1000 | sequence of | transporter | | | marxianus |
| SEQ ID | DNA coding | efflux | ET286 | From | artificial |
| NO: 1001 | sequence of | transporter | | | |
| SEQ ID | Amino acid | efflux | ET286 | From | Zygosaccharomyces |
| NO: 1002 | sequence of | transporter | | | bailii |
| SEQ ID | DNA coding | efflux | ET272 | From | artificial |
| NO: 1003 | sequence of | transporter | | | |
| SEQ ID | Amino acid | efflux | ET272 | From | Kazachstania |
| NO: 1004 | sequence of | transporter | | | africana |
| SEQ ID | DNA coding | efflux | ET311 | From | artificial |
| NO: 1005 | sequence of | transporter | | | |
| SEQ ID | Amino acid | efflux | ET311 | From | Kuraishia capsulata |
| NO: 1006 | sequence of | transporter | | | |
| SEQ ID | DNA coding | efflux | ET307 | From | artificial |
| NO: 1007 | sequence of | transporter | | | |
| SEQ ID | Amino acid | efflux | ET307 | From | Cyberlindnera |
| NO: 1008 | sequence of | transporter | | | americana |
| SEQ ID | DNA coding | efflux | ET295 | From | artificial |
| NO: 1009 | sequence of | transporter | | | |
| SEQ ID | Amino acid | efflux | ET295 | From | Tetrapisispora |
| NO: 1010 | sequence of | transporter | | | blattae |
| SEQ ID | DNA coding | efflux | ET282 | From | artificial |
| NO: 1011 | sequence of | transporter | | | |
| SEQ ID | Amino acid | efflux | ET282 | From | Zygosaccharomyces |
| NO: 1012 | sequence of | transporter | | | bailii |
| SEQ ID | DNA coding | efflux | ET270 | From | artificial |
| NO: 1013 | sequence of | transporter | | | |
| SEQ ID | Amino acid | efflux | ET270 | From | Hanseniaspora |
| NO: 1014 | sequence of | transporter | | | guilliermondii |
| SEQ ID | DNA coding | efflux | ET268 | From | artificial |
| NO: 1015 | sequence of | transporter | | | |
| SEQ ID | Amino acid | efflux | ET268 | From | Kazachstania |
| NO: 1016 | sequence of | transporter | | | saulgeensis |
| SEQ ID | DNA coding | efflux | ET252 | From | artificial |
| NO: 1017 | sequence of | transporter | | | |
| SEQ ID | Amino acid | efflux | ET252 | From | Lichtheimia ramosa |
| NO: 1018 | sequence of | transporter | | | |
| SEQ ID | DNA coding | efflux | ET303 | From | artificial |
| NO: 1019 | sequence of | transporter | | | |
| SEQ ID | Amino acid | efflux | ET303 | From | Wickerhamomyces |
| NO: 1020 | sequence of | transporter | | | mucosus |
| SEQ ID | DNA coding | efflux | ET274 | From | artificial |
| NO: 1021 | sequence of | transporter | | | |
| SEQ ID | Amino acid | efflux | ET274 | From | Tetrapisispora |
| NO: 1022 | sequence of | transporter | | | phaffii CBS 4417 |
| SEQ ID | DNA coding | efflux | ET301 | From | artificial |
| NO: 1023 | sequence of | transporter | | | |
| SEQ ID | Amino acid | efflux | ET301 | From | Kazachstania |
| NO: 1024 | sequence of | transporter | | | exigua |
| SEQ ID | DNA coding | efflux | ET265 | From | artificial |
| NO: 1025 | sequence of | transporter | | | |
| SEQ ID | Amino acid | efflux | ET265 | From | Kazachstania |
| NO: 1026 | sequence of | transporter | | | africana CBS 2517 |
| SEQ ID | DNA coding | efflux | ET299 | From | artificial |
| NO: 1027 | sequence of | transporter | | | |
| SEQ ID | Amino acid | efflux | ET299 | From | Kluyveromyces |
| NO: 1028 | sequence of | transporter | | | dobzhanskii |
| SEQ ID | DNA coding | efflux | ET293 | From | artificial |
| NO: 1029 | sequence of | transporter | | | |
| SEQ ID | Amino acid | efflux | ET293 | From | Lachancea |
| NO: 1030 | sequence of | transporter | | | mirantina |
| SEQ ID | DNA coding | efflux | ET196 | From | artificial |
| NO: 1031 | sequence of | transporter | | | |
| SEQ ID | Amino acid | efflux | ET196 | From | Clavispora |
| NO: 1032 | sequence of | transporter | | | lusitaniae |
| SEQ ID | DNA coding | efflux | ET202 | From | artificial |
| NO: 1033 | sequence of | transporter | | | |
| SEQ ID | Amino acid | efflux | ET202 | From | Pachysolen |
| NO: 1034 | sequence of | transporter | | | tannophilus |
| SEQ ID | DNA coding | efflux | ET306 | From | artificial |
| NO: 1035 | sequence of | transporter | | | |
| SEQ ID | Amino acid | efflux | ET306 | From | Cyberlindnera |
| NO: 1036 | sequence of | transporter | | | fabianii |
| SEQ ID | DNA coding | efflux | ET316 | From | artificial |
| NO: 1037 | sequence of | transporter | | | |
| SEQ ID | Amino acid | efflux | ET316 | From | Hanseniaspora |
| NO: 1038 | sequence of | transporter | | | uvarum |
| SEQ ID | DNA coding | efflux | ET321 | From | artificial |
| NO: 1039 | sequence of | transporter | | | |
| SEQ ID | Amino acid | efflux | ET321 | From | Candida theae |
| NO: 1040 | sequence of | transporter | | | |
| SEQ ID | Amino acid | Walker A | consensus | From | artificial |
| NO: 1041 | sequence of | motif variant | | | |
| | | 1 | | | |
| SEQ ID | Amino acid | Walker A | consensus | From | artificial |
| NO: 1042 | sequence of | motif variant | | | |
| | | 2 | | | |
| SEQ ID | Amino acid | Walker A | consensus | From | artificial |
| NO: 1043 | sequence of | motif variant | | | |
| | | 3 | | | |
| SEQ ID | Amino acid | Walker A | consensus | From | artificial |
| NO: 1044 | sequence of | motif variant | | | |
| | | 4 | | | |
| SEQ ID | Amino acid | Walker A | consensus | From | artificial |
| NO: 1045 | sequence of | motif variant | | | |
| | | 5 | | | |
| SEQ ID | Amino acid | Walker A | consensus | From | artificial |
| NO: 1046 | sequence of | motif variant | | | |
| | | 6 | | | |
| SEQ ID | Amino acid | Walker A | consensus | From | artificial |
| NO: 1047 | sequence of | motif variant | | | |
| | | 7 | | | |
| SEQ ID | Amino acid | Walker A | consensus | From | artificial |
| NO: 1048 | sequence of | motif variant | | | |
| | | 8 | | | |
| SEQ ID | Amino acid | Walker A | consensus | From: | artificial |
| NO: 1049 | sequence of | motif variant | | | |
| | | 9 | | | |
| SEQ ID | Amino acid | Walker A | consensus | From | artificial |
| NO: 1050 | sequence of | motif variant | | | |
| | | 10 | | | |
| SEQ ID | Amino acid | Walker A | consensus | From | artificial |
| NO: 1051 | sequence of | motif variant | | | |
| | | 11 | | | |
| SEQ ID | Amino acid | Walker A | consensus | From | artificial |
| NO: 1052 | sequence of | motif variant | | | |
| | | 12 | | | |
| SEQ ID | Amino acid | Walker A | consensus | From | artificial |
| NO: 1053 | sequence of | motif variant | | | |
| | | 13 | | | |
| SEQ ID | Amino acid | Walker A | consensus | From | artificial |
| NO: 1054 | sequence of | motif variant | | | |
| | | 14 | | | |
| SEQ ID | Amino acid | Walker A | consensus | From | artificial |
| NO: 1055 | sequence of | motif variant | | | |
| | | 15 | | | |
| SEQ ID | Amino acid | Walker A | consensus | From | artificial |
| NO: 1056 | sequence of | motif | | | |
| | | consensus | | | |
| SEQ ID | Amino acid | consensus | consensus | From | artificial |
| NO: 1057 | sequence of | Walker | | | |
| | | motifs | | | |
| SEQ ID | Amino acid | ABC efflux | consensus | From | artificial |
| NO: 1058 | sequence of | transporter | | | |
| | | consensus | | | |
| SEQ ID | Amino acid | ABC efflux | consensus | From | artificial |
| NO: 1059 | sequence of | transporter | | | |
| | | consensus | | | |
| SEQ ID | Amino acid | ABCC efflux | consensus | From | artificial |
| NO: 1060 | sequence of | transporter | | | |
| | | consensus | | | |
| SEQ ID | Amino acid | ABCG efflux | consensus | From | artificial |
| NO: 1061 | sequence of | transporter | | | |
| | | consensus | | | |
| | | Walker A | | | |
| SEQ ID | Amino acid | ABCG efflux | consensus | From | artificial |
| NO: 1062 | sequence of | transporter | | | |
| | | consensus | | | |
| | | Walker A | | | |
| SEQ ID | Amino acid | ABCG efflux | consensus | From | artificial |
| NO: 1063 | sequence of | transporter | | | |
| | | consensus | | | |
| | | linker | | | |
| SEQ ID | Amino acid | ABCG efflux | consensus | From | artificial |
| NO: 1064 | sequence of | transporter | | | |
| | | consensus | | | |
| | | linker | | | |
| SEQ ID | Amino acid | ABCG efflux | consensus | From | artificial |
| NO: 1065 | sequence of | transporter | | | |
| | | consensus | | | |
| | | Walker B | | | |
| SEQ ID | Amino acid | ABCG efflux | consensus | From | artificial |
| NO: 1066 | sequence of | transporter | | | |
| | | consensus | | | |
| | | Walker B | | | |
| SEQ ID | Amino acid | ABCG efflux | consensus | From | artificial |
| NO: 1067 | sequence of | transporter | | | |
| | | consensus | | | |

[0425] The above disclosed efflux transporters have the following sequences as shown in Table 2:

| | |
|---|---|
| SEQ ID | ATGGTCGAAAACAAGGCCAACAAGTTGGACTCTTCATCTTTGGAAGATAACGGTTTGGAAAG |
| NO: 909 | ACAACAGAGGTTGTTGTCATTTTTGTGGCCAAAAACTGTTCCACCATTGCCAAATGAAGATG |
| | AGAGATTGCTATACGGTGAAAAGAGAGCTGGTATTTTCTCTAAGGCTTTCTTCTGGTGGATG |
| | ATCCCAGTTATGAATCCAGGTTATATGAGAACCTTGCAGCCAGAAGATTTGTTCACTTTGACC |
| | GATGATATCTCCGTCGAACAAATGTCTGCTAGGTTTAACAAGCTGTTCAAGAAGAAGGTTGA |
| | TAAGGCTAAGAGAAAGCACATCATCCAAAAGTTCAAGAACAGAAACGAAAAGGTCGAGATC |
| | TCCGATATTGATCAGTACAAGGATGACTTGGAAGATTTCACTCCACCACAATTTTTGCCATGG |
| | TTCGTTATTATCGAAACCTTCAAGTGGGAATACTTCGCTGCTGTTATTTTCTTGGCTTTGATGT |
| | ACGGTACGAGTTCTTGTATTGCTCTGGTTACCAAAGAGTTGATCAAGTACGTTGAGTACAAA |
| | GCCGTTGGTGTTGAATTAGGTATTGGTAAAGGTTTGGGTTACGCTTTTGGTACTGTTGGTAT |
| | GGTTGTTTTCACTGGTTTTATGGGTAACCACTACTTCTACAGAGCTATGTTGATTGGTGCTAA |
| | GACTAAGGCCGTTCTGATTAAGTCTATCTTGGACAAGTCCTTCATCCTGTCTCCAAAGTCTAA |
| | GTTGAATTTCCCACATGCCAAGATCACCTCTATGATGTCTACTGATACTGCCAGAATTGACTT |
| | AGGTTTGGGATTGCAACCTCTGCTGTTGATTATTCCAATTCCAATCATCGTTTCGATCGCCATC |
| | TTGATCGTTAACATTGGTGTTTCTGCTTTGACTGGTATTGCCGTTATCATCTTGGTTTTGGTTT |
| | TGATTATGGGTGTCGGCTACTTCTTGTTCAAGTTTAGAAAGAAGGCTAACATCTCCACCGACC |
| | AAAGAATTTCTTCTATCAGAGAAGTCCTGTACAACCTGAAGATCATCAAGTTTTACTCTTGGG |
| | AATCCGCCTACTTGAAGAAGATTTCTGGTATTAGGAACGAAGAGACTAAGTGGATCTTGAGA |
| | ATGCAAGTCTTGAGGAACTTGATTATCTCCATTGCCATCTCCGTTAACTTGATCTGTTCTATGG |
| | TTTCCTTCTTGGTCTTGTACGCCATTGATTCTGATAGACATGATCCAGCTTCTATCTTCTCTTCT |
| | TTGACCTTGTTCGGTATCTTGTCCGAACAAGTTATTATGTTGCCATTGGCTTTGGCTACTACTA |
| | CTGATGCTCATGTTGGTTTACAAAGAGTCGGTCAATTTTTGGCCTCTGAAGAATCTGATCAAA |
| | CCTACAGAAAGATTGAAGCTTCTGGTAAGACTTTGGGTCGTATGCAAGAAAACAACATTGCC |
| | GTTGAAGTTAACAACGCCACTTTCATTTGGGAAACCTTCGATGTTTCTGATGAGGACTCTAAA |
| | ATCTCCGACGAAAACTCTGATGAGTCCAAGAATTCCTCTACTACCAACTCTACTTCCGAAAGA |
| | AACTTGGATGAAGAGGATAAGGATAACGAAACTCCATTCAAGGGTTTGATCGATGTCAACTT |
| | GACTGTTAACAAGGGTGAATTCGTTGTTATCACCGGTGTTATTGGTTCGGGTAAATCATCTTT |
| | GTTGTCCGCTATTTCTGGTTTGATGACTAGAACTTCCGGTGAAGTTAATGTTTGCGGTTCTTT |
| | GATTTCTTGTGGTGAACCATGGATTCAGAACGAGACTTTCAAAGAGAACATTTTGTTCGGTTC |
| | CGATTTCGACCCAGACTTCTACAAAGAAGTTGTTCACGCTTGTTCCTTGGAATCCGATATGGA |
| | AATTTTGCCAGCTGGTGATAAGACCGAAATTGGTGAAAGAGGTATTACTTTGTCTGGTGGTC |
| | AAAAGGCTAGATTGAATTTGGCTAGAGCTGTTTACACCAACAAGGACATTATCTTGTTGGAT |
| | GACGTTTTGTCAGCTGTTGATGCTAGAGTCGGTAAACATATTATGAACAACTGCATCTTGGG |
| | CACCTTGTCCTCTAAAACTAGAATTTTGGCTACCCACCAGTTGTCTTTGATTGGTTCTGCTGAT |
| | AAGGTTATCTTCATGAACGGTGATGGTTCTTTGGAAATCGGTAAGTTCGATGAATTGATCCA |
| | GAACTCTTCTGGTTTCAAGGACTTGATGTCTTTGAATGCTCAAGAGGTTGTCAGAGATGTTAC |
| | CAACAATGTTGAAAACGATTCCAAGTTTGCTGGTGTTGAGGACGAAAAACAGTACATCGAA |
| | GAACAGTTGATGAGAAGAACTACCACCACCTCTTATATTGAGGATGAGAAATCTGGTAGAAA |
| | CGGCGTTAATTTGGATAGAATTGATGACGGCAAGCTATTCTTGGCTGAAGAAAGAGCTGTTA |
| | ACCGTATCGAATTCAAGGTCTACAAGAATTACGTCAAGTACGGTTCTGGTATCTTCTCCTCAT |
| | TCTGCATCATTTTCTTGTTCTTGTTGTTCACTGTCTTGGCTACTTACTTCGAGTTGTTTACTAAT |
| | ACCTGGTTGTCCTTCTGGACCTCTAAAAAGTTTCCAGGTAGATTGGACAACTTCTACATTGGC |
| | TTGTACGTTACTTTTACCTTCTTGGCCTTTATCTTCCTGACCTTGGAATTTTTCGTTTTGGCTTA |
| | CGTTACTACCATTGCCTCTAGAACTTTGAATTTGATGGCCGTCAAGAAGATCTTGTTTGTCCC |
| | AATGTCTTTCATGGATACAACTCCAATGGGTAGAATCTTCAACAGATTCACTAAGGATACCGA |
| | TGCTTTGGACAACGAAATCGTTGAACAATTGACCGTCCTGTTCTACTTCATTGCTAACATTAC |
| | CGGTGTTCTGATTTTGTGCATTTGTTACTTACCCTGGTTCGCTATTGCTGTTCCTCCTTTGTTGT |
| | TTTTGTTCGTTGCTATTGCTAACTACTACCAGGCTTCTGCTAGAGAAATCAAGAGATTGGAAG |
| | CAGTTCAGAGATCCTTCGTTTACGACAATTTCAACGAAACCTTGTCTGGTATGGGTACTATCG |
| | TTGCTTACAAATCTAAGCACAGGTTCCTAAACAAAAACTCCTTCCTGATCGACAAAATGAACG |
| | AAGCTTACTACTTGACTATTGCCAATCAGAGATGGCTGACCATTTCTTTGGATATGGTTGGTG |
| | CTGTTTTCGTCTTATTGGTTGCTATGTTGTGCGTTAACAGAGTGTTCCACATTAACTCATCATC |
| | CGTTGGTTTGCTAATGTCCTACATCTTGCAAATCGTTGGCCAATTGTCTTTCTTGCTGAAAACT |
| | TTGACCCAAGTCGAAAACGAAATGAACTCCGTTGAAAGAATTTGCCATTACGCTTTCGATTTG |
| | CCTGAAGAAGCTCCATACGTTATCACTGAAAATTCTCCACCACCATCTTGGCCAGAAAAAGGT |
| | CAAATTTCTTTTAACCATGCCTCCATGGCTTACAGACCAGAATTACCATTGGTCTTGAAGGAT |
| | TTGGATGTCAACATTAAGCCCATGGAAAAGATAGGTGTTTGTGGTAGAACTGGTGCTGGTA |
| | AGTCATCTATTATGATGGCCTTGTACAGATTGGTCGAATTGAATTCTGGTTCCGTCGAAATTG |
| | ATGGTATCGATATTTCTACCTTGGGCCTGAACAATTTGAGATCCAGATTGTCCATTATTCCAC |
| | AGGATCCAATTTTGTTCTCCGGTACTATTAGAACTAACTTGGATCCATTCGATGAGTACACTG |
| | ATACAGAATTGTGGGATGCTTTGAAGAGATCCGGTTTGATTGATGAGAGCAAGATCTCTTCT |
| | GTTCAATCCCAAGATCCAAAGTCCGAAGATTTGAACAAGTTCCATTTGTTCAAGCAGGTCCAA |
| | GAAAACGGTACAAACTTTTCATTGGGTGAGAGACAATTGATTGCTTTCGCTAGAGCTTTGGT |
| | CAAGAGAACTAAGATCTTGATTTTGGACGAAGCTACCTCTTCCGTTGATTACGAAACTGATAA |
| | CAAGATTCAAAAGACCATCCTGAAAGAGTTCGGTACTTGCACCATTTTGTGTATTGCCCATAG |
| | ACTGAAAACCATCATCAACTACGATAGGATTTTGGTCTTGGAAAAGGGTGAAGTCAAAGAAT |
| | TCGACACTCCATGGAATCTGTTCAACACTAAGGACTCCATTTTCGAACAGATGTGCAGAAAAT |
| | CCAAGATTACTTCCGATGATTTCACCATCAAGACCATCTGA |
| SEQ ID | MVENKANKLDSSSLEDNGLERQQRLLSFLWPKTVPPLPNEDERLLYGEKRAGIFSKAFFWWMIP |
| NO: 910 | VMNPGYMRTLQPEDLFTLTDDISVEQMSARFNKLFKKKVDKAKRKHIIQKFKNRNEKVEISDIDQ |
| | YKDDLEDFTPPQFLPWFVIIETFKWEYFAAVIFLALMYGTSSCIALVTKELIKYVEYKAVGVELGIGK |
| | GLGYAFGTVGMVVFTGFMGNHYFYRAMLIGAKTKAVLIKSILDKSFILSPKSKLNFPHAKITSMM |
| | STDTARIDLGLGLQPLLLIIPIPIIVSIAILIVNIGVSALTGIAVIILVLVLIMGVGYFLFKFRKKANIS |
| | TDQRISSIREVLYNLKIIKFYSWESAYLKKISGIRNEETKWILRMQVLRNLIISIAISVNLICSMVSFLV |
| | LYAIDSDRHDPASIFSSLTLFGILSEQVIMLPLALATTTDAHVGLQRVGQFLASEESDQTYRKIEASGKTL |
| | GRMQENNIAVEVNNATFIWETFDVSDEDSKISDENSDESKNSSTTNSTSERNLDEEDKDNETPFK |
| | GLIDVNLTVNKGEFVVITGVIGSGKSSLLSAISGLMTRTSGEVNVCGSLISCGEPWIQNETFKENILF |
| | GSDFDPDFYKEVVHACSLESDMEILPAGDKTEIGERGITLSGGQKARLNLARAVYTNKDIILLDDVL |
| | SAVDARVGKHIMNNCILGTLSSKTRILATHQLSLIGSADKVIFMNGDGSLEIGKFDELIQNSSGFKD |
| | LMSLNAQEVVRDVTNNVENDSKFAGVEDEKQYIEEQLMRRTTTTSYIEDEKSGRNGVNLDRIDD |
| | GKLFLAEERAVNRIEFKVYKNYVKYGSGIFSSFCIIFLFLLFTVLATYFELFTNTWLSFWTSKKFPGRL |
| | DNFYIGLYVTFTFLAFIFLTLEFFVLAYVTTIASRTLNLMAVKKILFVPMSFMDTTPMGRIFNRFTKD |
| | TDALDNEIVEQLTVLFYFIANITGVLILCICYLPWFAIAVPPLLFLFVAIANYYQASAREIKRLEAVQRS |
| | FVYDNFNETLSGMGTIVAYKSKHRFLNKNSFLIDKMNEAYYLTIANQRWLTISLDMVGAVFVLLV |
| | AMLCVNRVFHINSSSVGLLMSYILQIVGQLSFLLKTLTQVENEMNSVERICHYAFDLPEEAPYVITE |
| | NSPPPSWPEKGQISFNHASMAYRPELPLVLKDLDVNIKPMEKIGVCGRTGAGKSSIMMALYRLV |
| | ELNSGSVEIDGIDISTLGLNNLRSRLSIIPQDPILFSGTIRTNLDPFDEYTDTELWDALKRSGLIDESKI |
| | SSVQSQDPKSEDLNKFHLFKQVQENGTNFSLGERQLIAFARALVKRTKILILDEATSSVDYETDNKI |
| | QKTILKEFGTCTILCIAHRLKTIINYDRILVLEKGEVKEFDTPWNLFNTKDSIFEQMCRKSKITSDDFTI |
| | KTI |
| SEQ ID | ATGTCCTCCAACACCTCCATGAAGGATGAAGATGATTACCAAGACTTGGAAAAGTCCAACGC |
| NO: 911 | TCATATTCAACAACCTAGACCAGTCAAGAGATTATTGACTCCTTTGTTGACTAAGTACGTCCC |
| | ACCAATTCCACAAGAATCTGAAAGAACTAGATTCCCATTCTACCACACCAACATTTTCTCTAA |
| | GGCTTTGTTTGCTTGGTTGTTGCCTTTGTTGTTTAAGGGTTACAAGAGAACCTTGCAACAAGA |
| | GGATTTGTGGAAGTTGGATGAACATACCTCTATCGATCACGTCTACATCAAGTTTGAAAAGC |
| | ACTTGAACGAAGAGTGGTTGAAGTTCGATGCTAAACATGATCCAATCAAGAACCCAGATGCT |
| | TTTCCTAGATTCGCTATTTTCATGGCTTTGATGAAGACCTTCAAGTACGAGTATACTGTTGCTA |
| | TCGTTACCAAGATTATCTCCAATGCTTTGTCCGCTTTTACCCCATTGGTTTCCAAAAAGTTGAT |
| | CTCCTTCATCTCCGAAAAAGCTTTGGTTCCAGATACGCCTATTAACAAAGGTATTGGTTACGC |
| | TTTCGGTATCACCTTCATGTTGATGTTCTCTGCCATCTTTATGAACCAGTCCTTGTTGCATTCTA |
| | AGTTCGTTGGTGGTCATTCCAGAACTATTTTGACCAAGGCTTTGATCCAAAAGTCCTTGATTG |
| | CTAACGCTGAAACCAGATTTCATTACCCATCCGGTAGAATCATCTCATTCATGTCTGCTGACTT |
| | GCAAAGAATCGACGAATCTTTGTTTGAATTGCCAACTGGTTTCACTACCTTGGAGCCAATTAT |
| | CATTGCTATTGTCTTGCTGATCGTTAACATTGGTGTTTCTGCTTTGGCTGGTATTGCTATCTTT |
| | TTCTTGACCTTGATCTTGATGGGTGTTCCAGCTGGTTCTTTGTTCAAAATTAGAGAAGCTGCT |
| | AACGTGTTCACCGATCAACGTGTTGGTAAAATGAGAGAAGTCATCCAGTCTATGAAGATGAT |
| | CAAGTTCTACTCTTGGGAAGATGCCTACGAAAACTTGATTACCGGTATCAGGTCTAAAGAGT |
| | CCTCTTTGGTTTTGAAGTTCCAGTTGACCATCAACGTCATGATTACTATTGCTATTAACGCCTC |
| | CTCCATTACTTCTATGGGTGCATTTTTGGTCTTGTACGCTGTTAAGTCTCATGGTAATCCAGCT |
| | AACGTTTTCTCCTCTTTGTCTTTGTTCGGTATCTTGTCCCAACAAGTTATCGAATTGCCTATGG |
| | TTTTTAGCTCTGCTGCTGAAGGTTTGTTGTCCTTGGATAGAATTACGAAGTACTTGAGATCTC |
| | CAGTTGAAACCTTTGACGTCGAAAACTTCTACGACTCCGAATTGATTAAGAACGACGAAATT |
| | GCCGTCCAAATCGAAAATGGTGAATTTGAATGGGAGCTGTTCACTGAGATCAAAGAAGATG |
| | ACGAAGAAACGAAAAAGCAGAAGAAGAAGGACGAAAAGCAGCGTAAGAAAGAGCTGAAA |
| | AAGTCTCAAGGTGGTAATGGTTGGTTCAACAAAAAGACTAAGACCACCGAAGATTCCTCCAA |
| | TGACGAAATCAACAAAGAATCCTCTACCGACGAAGATAACACTAATCAACAGAAGCCATTCA |
| | AGCTGTCCAACATCAACTTAAAGATTTCCAAGGGTGAATTCATCGTTGTTACTGGTCCAATTG |
| | GTTCCGGTAAATCTTCTTTATTGTCCGCTATTTCTGCCTTCATGACTAAGACTGATGGTAAGAT |
| | TGCTATCAACGGCTCTAATTTGTTGTGTGGTGCTCCATGGGTTCAAAACACTACTATTCGTGA |
| | AAACGTCTTGTTCGGTTCCAAGTTCGATCATGTTAAGTACAAGAAGGTTTTGGAGGTCTGCTC |
| | TTTGGAACATGATTTGAAGTCTTTGTTGGCTGGTGATATGACCGAAATTGGTGAAAGAGGTG |
| | TTACTTTGTCTGGTGGTCAAAAGGCTAGAGTTAATTTGGCTAGAGCTGTTTACGCTGACAAA |
| | GAAGTTTACTTGTTCGACGATATTTTGTCCGCCGTTGATGCTAATGTTGGTAAGAACATTACC |
| | GAGAACTGTTTGTTGGGTCTGTTGTCCTCTAAGACCATTATTATCGCTACCCATCAGCTGTCCT |
| | TAATTTCTAAAGCTGATAGGGTCGTTTTCTTGAACGGTGATGGTTTGATAGATGTCGGTACTG |
| | AATCTGAATTGAGGTCCAAGAACAAGGATTTTGTCAAGTTGATGGAGTACAACAAAGAGTT |
| | GGAACAAAAGAACACCGACGACGAAGAACAAATCAACGATAAGATTACTAAGGTCACCTCC |
| | ATTGCTGATAAGCCATCTGGTCCTATTGATGGTACTTTATTCGGTGAAGAAGAAAGGGCCTT |
| | TGATTCCATTCCATTGTCCTTGTACAAACAATACGTTAAGGCTGGTCAAGGTATGTTTGGTTT |
| | TACTGCTTTCCCATTGACCATTATCTGCATCATCTTGTCCGTTTTCGTCAACTTGTTCACTAACG |
| | TTTGGTTGTCTTTTTGGGTTGCCCAAAAGTTCAAGAACTTGTCTAATGGTCAGTACATCGGCT |
| | TGTACGTTATGTTTACAGTTCTGTCTGTTCTGTTCGTTGTCGTTGAATTGGCTATTATGGGTTA |
| | CGTTTTTACCGAAGCTTCTAAGACGTTGAACTTGAAGGCTATGCAAAAGGTTTTACACTCCCC |
| | AATGTCTTTCATTGATACAACTCCAGTCGGTAGGATCATCAACAGATTTTCTAAGGACACCAA |
| | CAGCTTGGATAACGAAATAGGTATGCAGCTGAAGTTGTTCTTGCATTTCTCTTCCACCATCAT |
| | CGGCATTATCATTTTGGCCATTATCTACTTGCCATGGTTCGCTATTGCTGTTCCATTTTTGGCT |
| | ATTTTCTTTTTGTGCGCCACCAACTTCTATCAAGCTTCTTCTAGAGAAGTGAAGAGATTGGAA |
| | GCCATTAACAGATCCTTCGTCTACAACAATTTCAACGAAGTCATGAACGGTATGAACACCATT |
| | AAGGCTTATGGTGCTGGTGAAAGGTTCATCAGAAAGAATGATATTTTCGGCGACCAATTGAA |
| | CGAGGTTTACTTCGTTGTTGTTTCTAACCAGAGATGGATTGCCGTTAACTTGGATATTATGGC |
| | TACTGCCGTTGTTTTCATTGTCGCTATGTTGTCTGTTACCGGTCAATTTTCAATCAACGCTTCA |
| | TCTGTTGGTCTGCTAACCTACTACATGATTGAATTGTCCCAGATGTTGAGCTTCTTGATGCAA |
| | ACTTACTCCGAAGTCGAAAACGAAATGAACTCTGTTGAAAGAGTTTGCCATTACGCCAACGA |
| | TTTGGAACAAGAATCAGCTTACAGAACTTTGGACTATCAGCCAAGACCAACTTGGCCTGAAG |
| | AAGGTGGTATTAAGTTTGACAACTTGTCCTTGAGGTACAGAGATGGTTTACCATTGGTCTTG |
| | AAGAACCTGTCCATAGATATCAAAGGTGGTGAAAAGATTGGTATCTGCGGTAGAACAGGTG |
| | CTGGTAAATCTAGTTTGATGATAGCCTTGTACAGAATTGCTGAATTCGCTGAAGGTGGCATTT |
| | TTATCGATGGTACTGATATTTCTAAGCTGGGCTTGCACGATTTGAGATCCAAGTTGTCTATTA |
| | TCCCACAAGATCCAGTGTTGTTCCAAGGTACTATTAAGTCCAATTTGGACCCATTCAACGAAT |
| | CCACAGAATCAGAATTGTGGGATGCTTTGAGAAGATCTGGTTTGATTACTCCCGAAGAAATG |
| | ATCAAAATGAAGGACGAGAATGAGAACGAGTACTCCAAGTTTCACTTGAATTCCGTTGTAGA |
| | AGATGAGGGCTCTAACTTTTCATTGGGTGAAAGACAATTATTGGCTTTGGCAAGAGCATTGG |
| | TCAGAAGGTCTAAGATCTTGATTATGGATGAAGCCACTTCCTCCGTTGATTACAAAACTGATT |
| | CTTTGGTCCAAGAGACTATCGCTAGAGAATTTTCTGATTGCACCATTTTGTGCGTTGCCCATA |
| | GATTGAAAACCATCATTAAGTACGACAGGATCTTGGTGTTGGAAAAAGGTGAGTTGGAAGA |
| | ATTTGACAAGCCATTGGATTTGTTCAAGAAGCAGGGTATCTTCAGAGATATGTGCAAGATTT |
| | CTAACATCGGTGTCGAGGATTTCTAA |
| SEQ ID | MSSNTSMKDEDDYQDLEKSNAHIQQPRPVKRLLTPLLTKYVPPIPQESERTRFPFYHTNIFSKALF |
| NO: 912 | AWLLPLLFKGYKRTLQQEDLWKLDEHTSIDHVYIKFEKHLNEEWLKFDAKHDPIKNPDAFPRFAIF |
| | MALMKTFKYEYTVAIVTKIISNALSAFTPLVSKKLISFISEKALVPDTPINKGIGYAFGITFMLMFSAIF |
| | MNQSLLHSKFVGGHSRTILTKALIQKSLIANAETRFHYPSGRIISFMSADLQRIDESLFELPTGFTTL |
| | EPIIIAIVLLIVNIGVSALAGIAIFFLTLILMGVPAGSLFKIREAANVFTDQRVGKMREVIQSMKMIKF |
| | YSWEDAYENLITGIRSKESSLVLKFQLTINVMITIAINASSITSMGAFLVLYAVKSHGNPANVFSSLS |
| | LFGILSQQVIELPMVFSSAAEGLLSLDRITKYLRSPVETFDVENFYDSELIKNDEIAVQIENGEFEWE |
| | LFTEIKEDDEETKKQKKKDEKQRKKELKKSQGGNGWFNKKTKTTEDSSNDEINKESSTDEDNTNQ |
| | QKPFKLSNINLKISKGEFIVVTGPIGSGKSSLLSAISAFMTKTDGKIAINGSNLLCGAPWVQNTTIRE |
| | NVLFGSKFDHVKYKKVLEVCSLEHDLKSLLAGDMTEIGERGVTLSGGQKARVNLARAVYADKEVY |
| | LFDDILSAVDANVGKNITENCLLGLLSSKTIIIATHQLSLISKADRVVFLNGDGLIDVGTESELRSKNK |
| | DFVKLMEYNKELEQKNTDDEEQINDKITKVTSIADKPSGPIDGTLFGEEERAFDSIPLSLYKQYVKA |
| | GQGMFGFTAFPLTIICIILSVFVNLFTNVWLSFWVAQKFKNLSNGQYIGLYVMFTVLSVLFVVVEL |
| | AIMGYVFTEASKTLNLKAMQKVLHSPMSFIDTTPVGRIINRFSKDTNSLDNEIGMQLKLFLHFSSTI |
| | IGIIILAIIYLPWFAIAVPFLAIFFLCATNFYQASSREVKRLEAINRSFVYNNFNEVMNGMNTIKAYG |
| | AGERFIRKNDIFGDQLNEVYFVVVSNQRWIAVNLDIMATAVVFIVAMLSVTGQFSINASSVGLLT |
| | YYMIELSQMLSFLMQTYSEVENEMNSVERVCHYANDLEQESAYRTLDYQPRPTWPEEGGIKFD |
| | NLSLRYRDGLPLVLKNLSIDIKGGEKIGICGRTGAGKSSLMIALYRIAEFAEGGIFIDGTDISKLGLHD |
| | LRSKLSIIPQDPVLFQGTIKSNLDPFNESTESELWDALRRSGLITPEEMIKMKDENENEYSKFHLNS |
| | VVEDEGSNFSLGERQLLALARALVRRSKILIMDEATSSVDYKTDSLVQETIAREFSDCTILCVAHRLK |
| | TIIKYDRILVLEKGELEEFDKPLDLFKKQGIFRDMCKISNIGVEDF |
| SEQ ID | ATGGCCAAGGATGGTATCGTTACTTCTACTGAAGCTCCATTGAAAGATGCTGAATCTGGTCA |
| NO: 913 | ATTGGTTTTGGAGAGAAGATTATTGACCCCTCTGTTGTCTAAAAAGGTTCCACCAATTCCAAC |
| | CGACGAAGAAAGAAAGTTTTACCCATTCAAGAAGGCTAACCCAATCTCCAAAGTTTTCTTTTG |
| | GTGGTTGAACCCAATCATGAACGTTGGTTACAAGAGAACTTTGACCCCACAAGATTTGTTCA |
| | AGTTGACTCCAGATATGACCATCGATCATACCTACGAAAAGTTCGATAGATACTTGACCAAG |
| | ATCGTCGAAAAAGATAGAGCTGCTGCTTTGAAAAAGGATCCATCTTTAACTCCAGAGGACTT |
| | GGAAAGAAGAGAATACCCAAAGTTCGCCATTATTAAGGCTTTGTTCTTGACCTTCAAGTGGG |
| | AATACTCTACCGCTATTATGTTCAAGGTTTTCGCTGATGTTTGTGGTGTCTGTAATCCCTTGTT |
| | GTCCAAAGAATTGATCAAGTTCGTTTCCCGTAAGACCTTGAATGCTGATATTGCTGTTAATGA |
| | TGGTGTTGGTTACGCTTTCGGTTGTACTTTGTTGTTGGCTTTCTCTGGCATCTTCATTAACCAG |
| | TTCTTGCATTTGTCTATTACTACCGGTGCTCATTGCAAGGGTATTTTGACTACTGCTTTGCTGA |
| | AAAAGTCCTTCAGAGCTGATGCTGAAACTAGACATAAGTTTACCTCTGGTAGAATCACCTCTT |
| | TGATGTCTACTGATTTGGCCAGAATTGATTTGGCTATCGGTTTACAACCATTCGGTTGGACAT |
| | TTCCAATTCCAGTTATTATTGCCATTGCCTTGTTGATCGTTAATATCGGTGTTGCTTCTTTGGC |
| | TGGTATTGCCGTTTTCATTATCTCCATTTTGGTTATTGGTGGTTCTGCTAAGGCTCTGTTGAAA |
| | ATGAGAAGAGGTGCTAACAAGTTCACCGACAAGAGAATTTCTTTGATGAGGGAAATCCTGC |
| | AGTCCATGAAGATGATTAAGTACTACTCTTGGGAAGATGCCTACGAATCTTCTGTTGTTGAAC |
| | AGAGAAATTCCGAAGTTGGTGTCATCTTGAAGATGCAGTCTATCAGAAACTTCTTGCTGGCC |
| | TTCTCTATTTCTTTGCCATCTTTCACTTCCATGATCGCTTTCTTGGTCTTGTACGGTATTTCCTCT |
| | AATAGAAACCCAGCCAACATCTTCCCTTCCATTTCTTTGTTTGGTTCCTTGGCTCAACAAACCA |
| | TGATGTTGCCAATGGCTTTGGCTACTGGTACTGATGCTATGATTGGTTTGAATAGAGTCAGG |
| | GAATTCTTGCAATCTGGTGTTGATTTGGAAGATCCTGAAGCACCACAAGGTAATGATCAAGA |
| | TTCTCAAGATGCCAACGTTGAAAAGTTGCCAGAAGATGTAGCTTTGTCTGTTAAGAACGCTA |
| | CCTTCATTTGGGAAACCTTTGATGATGAAGAGGATGAAGGTGCTGATAAGCCAAAAGCTGAT |
| | ACTGCTACTGAAAAGAAGGATTCCGATATTGCTACTCCAGCTACTTCTACCAAAGATACCCAT |
| | TCTGATTCCGAATTGAAGAACACTGCTTCTTCTACCGAAGAAGAAGGTCACGAATCTTACACT |
| | AAGTCTGTTTTCGAAGGTTTCCACAACATCAACTTGGATGTTAAGAAGGGTGAATTCGTTATT |
| | GTCACTGGTGCTATTGGTTCCGGTAAATCCTCTTTGTTGATTGCTTTAGCTGGTTTCATGAAG |
| | CAAACTGGTGGTACTTTAACTGCTGCTGAAGATGTTTTGTTGTGTGGTGCTCCATGGGTTCAA |
| | AACACTACTGTTAGAGAAAACATCACCTTCGGTTTGCCATACGAAGAGGAAAGATACGAAA |
| | GGGTTATTGATGCTTGTGCCTTGAGAGATGATTTGAAGTTGTTTGCCGGTGGTGATTTGACT |
| | GAAATTGGTGAAAGAGGTATCACTTTGTCTGGTGGTCAAAAGGCTAGAATCAATTTGGCTAG |
| | AGCTGTTTACGCTGATAAGTCCATCGTTTTGTTCGATGATGTTCTGTCTGCTGTTGATGCTAG |
| | AGTTGGTAAGCACATTATTGATGACTGTTTCGGTGAGTACATGAAGGGTAAGACTAGAGTTT |
| | TAGCTACCCACCAATTGTCCTTGGTTGATAAGGCTGATAGAGTCGTCTTTTTGAATGGTGATG |
| | GTACATTGCATATCGGTACTGTTGAAGAGTTGTTGACTTCCAATGAAGGCTTCATCAAGCTG |
| | ATGGAATTCTCCAAGAAATCCTCCGAAGATGACGAAGAAGAGGACGAGGATATTGATGAAG |
| | AAGAACAAGAAATTATCGCCCTGCAAAAGTCTCAATCCTTGGCTGTTATTCAGTCCAAAAAG |
| | AACAACAATGATGCTGCTGCTGGTGTTTTGGTTAACGAGGAAGAAAGAGCCAAAAACAAGA |
| | TCTCCTCTAAGGTTTACACCGAGTATTTGAGAGAAGGTGGTGGTATTTTGGGTAAATTTGCT |
| | GCTCCAATTGCCATCCTGTTGCTGATTTTGGATGTTTTCACTACCATTTTCATCAACGTCTGGT |
| | TGTCTTTCTGGATTACTTACAAGTGGAAGAACAGATCCGATGGTTTCTACATCGGTTTCTACG |
| | TTATGTTCGTTGTCCTGAATATCTGCTTCATTGCCTCTTGTTTCGTCTTGTTGGGTTACATTTCT |
| | ACTACCTCTGCTAGGGAATTGAACTTGAAAGCTATGAGAAGAATCTTGCATGCTCCTATGGC |
| | TTATTTGGATGTAACTCCAATGGGCAGAATTTTGAACAGATTCACTAAGGATACCGACGTCTT |
| | GGATAATGAATTGGGTGAACAATTGAGGTTGTTCTTGCACCCAACTGCTTTTGTTATCGGTGT |
| | CATTATTCTGTGCATCATCTACTTGCCATGGTTCGCTTTAGTTATTCCACCATTATTGGTCGTTT |
| | TCTCTTGCGTTACCTCTTACTACCAATCCTCATCTAGAGAAGTCAAGAGATTGGAAGCTGTTC |
| | AAAGGTCTTTCGTCTACAACAATTTCAACGAAGTGTTGAACGGTATGTCTACCTTGAAGGCTT |
| | ATAGAGCTACCTCTAGGTTCCTGAAGAAAAACAACGTTTCCGTTGACAGAATGAACGAAGCT |
| | TACTTCGTTGTTATCGCCAATCAGAGATGGATCTCCATTCATATGGATATGGTTGCTGTTTGC |
| | TTGTTGTTTGTTGTAGCTATGTTGGCCGTTACCAGACAATTTTCTATTTCTGCTGCTTCTGCAG |
| | GTTTGGTTGTTACTTACGTTATGCAAATAGGTGGCCTGATGTCCTTGATTATGAGAGCTTATA |
| | CAACCGTCGAAAACGAGATGAATTCCGTTGAAAGATTGTGCCAATACGCCAACGATTTGGTT |
| | CAAGAAAAACCATACAGGATCAACGAGACAAAACCATCTCCATCTTGGCCTGAATCAGGTTC |
| | TATTGAATTCGAAGGTGTCTCCTTGAGATATAGAGATGGCTTGCCATTGGTCTTGAGAAATTT |
| | GACTTTGGCTGTTGCTGGTGGTGAGAAGATTGGTATTTGTGGTAGAACTGGTGCTGGTAAGT |
| | CATCTATTATGACTGCCTTGTACAGGTTGTCTGAATTGGCTGAAGGTAGGATTTTGATTGATG |
| | GTTTGGACATCTCTAAGATGGGTTTGTTCGAATTGAGGTCCAAGTTGTCCATTATTCCACAAG |
| | ATCCAGTTTTGTTCCAGGGCACTATTAGAAGAAACTTGGATCCATTTGGTGAATCCGATGATC |
| | AACATTTGTGGGATTCTTTGCGTAGAGCTGGTTTGATCGATTCTTCTGTTTTGGCTACAATCA |
| | AGGCCCAAGGTAAAGAAGATAAGAACTTCCATAAGTTCCACTTGGATCAAGCTGTAGAAGA |
| | TGATGGTTCTAACTTCAGTTTGGGTGAAAGACAATTATTGGCATTGGCAAGAGCTTTGGTCA |
| | GAAACTCCAGAATATTGATCTTGGATGAAGCCACTTCCTCCGTTGATTACGAAACAGATGCTA |
| | AGATTCAGAGCACCATCAAGTCTGAATTCTCTGAATGTACGATCTTGTGCATTGCCCATAGAC |
| | TGAAAACCATTTTGGATTACGACAAGATCTTAGTCTTGGAAGCCGGTGAAATCGAAGAATTT |
| | GGTACTCCAATGACCTTGTACGAAAACGACGGTATTTTCAGACAAATGTGCGATAGATCCGA |
| | TATCACTAGGGAAGATTTTGTTCACGACCTGTGA |
| SEQ ID | MAKDGIVTSTEAPLKDAESGQLVLERRLLTPLLSKKVPPIPTDEERKFYPFKKANPISKVFFWWLNP |
| NO: 914 | IMNVGYKRTLTPQDLFKLTPDMTIDHTYEKFDRYLTKIVEKDRAAALKKDPSLTPEDLERREYPKFA |
| | IIKALFLTFKWEYSTAIMFKVFADVCGVCNPLLSKELIKFVSRKTLNADIAVNDGVGYAFGCTLLLAF |
| | SGIFINQFLHLSITTGAHCKGILTTALLKKSFRADAETRHKFTSGRITSLMSTDLARIDLAIGLQPFG |
| | WTFPIPVIIAIALLIVNIGVASLAGIAVFIISILVIGGSAKALLKMRRGANKFTDKRISLMREILQSMK |
| | MIKYYSWEDAYESSVVEQRNSEVGVILKMQSIRNFLLAFSISLPSFTSMIAFLVLYGISSNRNPANIF |
| | PSISLFGSLAQQTMMLPMALATGTDAMIGLNRVREFLQSGVDLEDPEAPQGNDQDSQDANVE |
| | KLPEDVALSVKNATFIWETFDDEEDEGADKPKADTATEKKDSDIATPATSTKDTHSDSELKNTASS |
| | TEEEGHESYTKSVFEGFHNINLDVKKGEFVIVTGAIGSGKSSLLIALAGFMKQTGGTLTAAEDVLLC |
| | GAPWVQNTTVRENITFGLPYEEERYERVIDACALRDDLKLFAGGDLTEIGERGITLSGGQKARINL |
| | ARAVYADKSIVLFDDVLSAVDARVGKHIIDDCFGEYMKGKTRVLATHQLSLVDKADRVVFLNGD |
| | GTLHIGTVEELLTSNEGFIKLMEFSKKSSEDDEEEDEDIDEEEQEIIALQKSQSLAVIQSKKNNNDAA |
| | AGVLVNEEERAKNKISSKVYTEYLREGGGILGKFAAPIAILLLILDVFTTIFINVWLSFWITYKWKNR |
| | SDGFYIGFYVMFVVLNICFIASCFVLLGYISTTSARELNLKAMRRILHAPMAYLDVTPMGRILNRFT |
| | KDTDVLDNELGEQLRLFLHPTAFVIGVIILCIIYLPWFALVIPPLLVVFSCVTSYYQSSSREVKRLEAV |
| | QRSFVYNNFNEVLNGMSTLKAYRATSRFLKKNNVSVDRMNEAYFVVIANQRWISIHMDMVAV |
| | CLLFVVAMLAVTRQFSISAASAGLVVTYVMQIGGLMSLIMRAYTTVENEMNSVERLCQYANDLV |
| | QEKPYRINETKPSPSWPESGSIEFEGVSLRYRDGLPLVLRNLTLAVAGGEKIGICGRTGAGKSSIMT |
| | ALYRLSELAEGRILIDGLDISKMGLFELRSKLSIIPQDPVLFQGTIRRNLDPFGESDDQHLWDSLRRA |
| | GLIDSSVLATIKAQGKEDKNFHKFHLDQAVEDDGSNFSLGERQLLALARALVRNSRILILDEATSSV |
| | DYETDAKIQSTIKSEFSECTILCIAHRLKTILDYDKILVLEAGEIEEFGTPMTLYENDGIFRQMCDRSD |
| | ITREDFVHDL |
| SEQ ID | ATGCCCGAGGCCAAGCTTAACAATAACGTCAACGACGTTACTAGCTACTCCTCCGCGTCTTCT |
| NO: 915 | TCTACTGAAAACGCTGCTGATCTACACAATTATAATGGGTTCGATGAGCATACAGAAGCTCG |
| | AATCCAAAAACTGGCAAGGACTCTGACCGCACAGAGTATGCAAAACTCCACTCAATCGGCAC |
| | CCAACAAAAGTGATGCTCAGTCTATATTTTCTAGCGGTGTGGAAGGTGTAAACCCGATATTC |
| | TCTGATCCTGAAGCTCCAGGCTATGACCCAAAATTGGACCCCAACTCCGAAAATTTTTCTAGT |
| | GCCGCCTGGGTTAAGAATATGGCTCACCTAAGTGCGGCAGACCCTGACTTTTATAAGCCTTA |
| | TTCCTTAGGTTGCGCTTGGAAGAACTTAAGTGCTTCTGGTGCTTCCGCAGATGTCGCCTATCA |
| | GTCAACTGTGGTTAATATTCCATACAAAATCCTAAAAAGTGGGCTGAGAAAGTTTCAACGTT |
| | CTAAAGAAACCAATACTTTCCAAATCTTGAAACCAATGGATGGTTGCCTAAACCCAGGTGAA |
| | TTGCTAGTCGTTTTAGGTAGACCAGGCTCTGGCTGTACTACTTTATTAAAATCCATCTCTTCAA |
| | ATACTCATGGTTTTGATCTTGGTGCAGATACTAAAATTTCTTACAGCGGCTACTCAGGTGATG |
| | ATATTAAGAAACATTTTCGTGGTGAAGTTGTTTACAACGCAGAAGCTGATGTACATCTGCCTC |
| | ATTTAACAGTCTTCGAAACTTTGGTTACAGTAGCGAGGTTGAAAACCCCACAGAACCGTATC |
| | AAGGGTGTCGATAGGGAAAGTTATGCGAATCATTTGGCGGAAGTAGCAATGGCAACGTACG |
| | GTTTATCGCATACAAGGAATACAAAAGTTGGTAACGACATCGTCAGAGGTGTTTCCGGTGGT |
| | GAAAGGAAGCGTGTCTCCATTGCTGAAGTCTCCATCTGTGGATCCAAATTTCAATGCTGGGA |
| | TAATGCTACAAGGGGTTTGGATTCCGCTACCGCTTTGGAATTTATTCGTGCCTTAAAGACTCA |
| | AGCTGATATTTCCAATACATCTGCCACAGTGGCCATCTATCAATGTTCTCAAGATGCGTACGA |
| | CTTGTTCAATAAAGTCTGTGTTTTGGATGATGGTTATCAGATCTACTATGGCCCCGCCGATAA |
| | GGCCAAGAAGTACTTTGAAGATATGGGGTATGTTTGTCCAAGCAGACAAACCACCGCAGATT |
| | TTTTGACCTCAGTTACAAGTCCCTCTGAGAGAACCCTGAACAAAGATATGCTAAAAAAAGGT |
| | ATTCATATACCACAGACCCCGAAGGAAATGAACGATTACTGGGTAAAATCTCCAAATTACAA |
| | AGAGCTAATGAAAGAAGTCGACCAACGATTATTGAATGACGATGAAGCAAGCCGTGAAGCT |
| | ATTAAGGAAGCCCACATTGCTAAGCAGTCCAAGAGAGCAAGACCTTCCTCTCCTTATACTGTC |
| | AGCTACATGATGCAAGTTAAATACCTATTAATCAGAAATATGTGGAGACTGCGAAATAATAT |
| | CGGGTTTACATTATTTATGATTTTGGGTAACTGTAGTATGGCTTTAATCTTGGGTTCAATGTTT |
| | TTCAAGATCATGAAAAAGGGTGATACTTCTACATTCTATTTCCGTGGTTCTGCTATGTTTTTTG |
| | CAATTCTATTCAATGCATTTTCTTCTCTGTTAGAAATCTTTTCGTTATATGAGGCCAGACCAAT |
| | CACTGAAAAACATAGAACATATTCGTTATACCATCCAAGTGCTGACGCTTTTGCATCAGTTCT |
| | ATCAGAAATACCCTCAAAGTTAATCATCGCTGTTTGCTTCAATATAATCTTCTATTTCTTAGTA |
| | GACTTTAGAAGAAATGGTGGTGTATTCTTTTTCTACTTATTAATAAACATTGTCGCGGTTTTCT |
| | CCATGTCTCACTTGTTTAGATGTGTTGGTTCCTTAACAAAGACATTGTCAGAAGCTATGGTTC |
| | CCGCTTCTATGTTATTGTTGGCTCTATCCATGTATACCGGTTTTGCTATTCCTAAGAAGAAGAT |
| | CCTACGTTGGTCTAAATGGATTTGGTATATCAATCCGTTGGCTTACTTATTCGAATCTTTGTTA |
| | ATTAACGAGTTTCATGGTATAAAATTCCCCTGCGCTGAATATGTTCCTCGTGGTCCTGCGTAT |
| | GCAAACATTTCTAGTACAGAATCTGTTTGTACCGTGGTTGGAGCTGTTCCAGGCCAAGACTA |
| | TGTTCTGGGTGATGATTTCATTAGAGGAACTTATCAATACTACCACAAAGACAAATGGCGTG |
| | GTTTCGGTATTGGTATGGCTTATGTCGTCTTCTTTTTCTTTGTCTATCTATTCTTATGTGAATAC |
| | AACGAGGGTGCTAAACAAAAAGGTGAAATATTAGTTTTCCCACGCAGTATAGTTAAAAGAAT |
| | GAAGAAAAGAGGTGTACTAACTGAAAAGAATGCAAATGACCCCGAAAACGTTGGGGAACG |
| | TAGTGACTTATCCAGCGATAGGAAAATGCTACAAGAAAGCTCTGAAGAGGAATCCGATACTT |
| | ACGGAGAAATTGGTTTATCCAAGTCAGAGGCTATATTTCACTGGAGAAACCTTTGTTACGAA |
| | GTTCAGATTAAGGCCGAAACAAGACGTATTTTGAACAATGTTGATGGTTGGGTTAAACCAGG |
| | TACTTTAACAGCTTTAATGGGTGCTTCAGGTGCTGGTAAAACCACACTTCTGGATTGTTTGGC |
| | CGAAAGGGTTACCATGGGTGTTATAACTGGTGATATCTTGGTCAATGGTATTCCCCGTGATA |
| | AATCTTTCCCAAGATCCATTGGTTATTGTCAGCAACAAGATTTGCATTTGAAAACTGCCACTG |
| | TGAGGGAGTCATTGAGATTTTCTGCTTACCTACGTCAACCAGCTGAAGTTTCCATTGAAGAA |
| | AAGAACAGATATGTTGAAGAAGTTATTAAAATTCTTGAAATGGAAAAATATGCTGATGCTGT |
| | TGTTGGTGTTGCTGGTGAAGGTTTAAACGTTGAACAAAGAAAAAGATTAACCATTGGTGTTG |
| | AATTAACTGCCAAACCAAAACTGTTGGTCTTTTTAGATGAACCTACTTCTGGTTTGGATTCTCA |
| | AACTGCTTGGTCTATTTGTCAGCTAATGAAAAAGTTGGCAAATCATGGTCAAGCAATTCTATG |
| | TACTATTCACCAACCCTCTGCTATTTTGATGCAAGAATTCGATCGTTTACTATTTATGCAACGT |
| | GGTGGTAAGACTGTCTACTTTGGCGACTTGGGCGAAGGTTGTAAAACTATGATCGATTATTT |
| | TGAAAGCCATGGTGCTCATAAATGCCCTGCTGACGCCAACCCAGCTGAATGGATGCTAGAAG |
| | TTGTTGGTGCAGCTCCAGGCTCTCATGCAAATCAAGATTATTACGAAGTTTGGAGGAATTCT |
| | GAAGAGTACAGGGCCGTTCAATCTGAATTAGATTGGATGGAAAGAGAATTACCAAAGAAAG |
| | GTTCGATAACTGCAGCTGAGGACAAACACGAATTTTCACAATCAATTATTTATCAAACAAAAT |
| | TGGTCAGTATTCGTCTATTCCAGCAATATTGGAGATCTCCAGATTATTTATGGTCGAAGTTTA |
| | TTTTAACTATTTTCAATCAATTGTTCATCGGTTTCACTTTCTTCAAAGCAGGAACCTCGCTACA |
| | GGGTTTACAAAATCAAATGTTGGCTGTGTTCATGTTTACGGTTATTTTCAATCCTATTCTACAA |
| | CAATACCTACCATCTTTTGTCCAGCAAAGAGATTTGTATGAGGCCAGGGAACGCCCCTCAAG |
| | GACTTTTTCTTGGATTTCATTTATCTTCGCTCAAATATTCGTGGAAGTTCCATGGAATATATTG |
| | GCAGGTACTATTGCTTATTTTATCTACTATTATCCAATTGGATTTTACTCCAACGCGTCTGCAG |
| | CTGGCCAGTTGCATGAAAGGGGTGCTTTATTTTGGTTGTTCTCTTGTGCTTTCTACGTTTATGT |
| | TGGTTCTATGGGTCTGCTTGTCATTTCATTCAACCAAGTTGCAGAAAGTGCAGCTAACTTAGC |
| | CTCTTTGTTGTTTACAATGTCTTTGTCTTTTTGTGGTGTTATGACTACCCCAAGTGCCATGCCT |
| | AGATTTTGGATATTCATGTACAGGGTTTCACCTTTGACTTATTTCATTCAGGCTCTGTTGGCTG |
| | TTGGTGTTGCTAACGTAGACGTCAAATGCGCTGATTACGAATTGCTAGAATTCACACCACCAT |
| | CCGGTATGACATGTGGGCAGTACATGGAACCATATTTACAACTAGCAAAGACTGGTTACTTA |
| | ACTGATGAAAATGCCACTGACACCTGTAGTTTCTGTCAAATATCTACAACCAATGATTACTTA |
| | GCTAATGTCAATTCTTTCTACAGTGAGAGATGGAGAAATTATGGTATCTTCATCTGTTATATT |
| | GCATTCAATTATATCGCTGGTGTCTTTTTCTACTGGTTAGCAAGAGTGCCTAAAAAGAACGGT |
| | AAACTCTCCAAGAAATAA |
| SEQ ID | MPEAKLNNNVNDVTSYSSASSSTENAADLHNYNGFDEHTEARIQKLARTLTAQSMQNSTQSAP |
| NO: 916 | NKSDAQSIFSSGVEGVNPIFSDPEAPGYDPKLDPNSENFSSAAWVKNMAHLSAADPDFYKPYSL |
| | GCAWKNLSASGASADVAYQSTVVNIPYKILKSGLRKFQRSKETNTFQILKPMDGCLNPGELLVVL |
| | GRPGSGCTTLLKSISSNTHGFDLGADTKISYSGYSGDDIKKHFRGEVVYNAEADVHLPHLTVFETL |
| | VTVARLKTPQNRIKGVDRESYANHLAEVAMATYGLSHTRNTKVGNDIVRGVSGGERKRVSIAEV |
| | SICGSKFQCWDNATRGLDSATALEFIRALKTQADISNTSATVAIYQCSQDAYDLFNKVCVLDDGY |
| | QIYYGPADKAKKYFEDMGYVCPSRQTTADFLTSVTSPSERTLNKDMLKKGIHIPQTPKEMNDYW |
| | VKSPNYKELMKEVDQRLLNDDEASREAIKEAHIAKQSKRARPSSPYTVSYMMQVKYLLIRNMWR |
| | LRNNIGFTLFMILGNCSMALILGSMFFKIMKKGDTSTFYFRGSAMFFAILFNAFSSLLEIFSLYEARP |
| | ITEKHRTYSLYHPSADAFASVLSEIPSKLIIAVCFNIIFYFLVDFRRNGGVFFFYLLINIVAVFSMSHLFR |
| | CVGSLTKTLSEAMVPASMLLLALSMYTGFAIPKKKILRWSKWIWYINPLAYLFESLLINEFHGIKFP |
| | CAEYVPRGPAYANISSTESVCTVVGAVPGQDYVLGDDFIRGTYQYYHKDKWRGFGIGMAYVVFF |
| | FFVYLFLCEYNEGAKQKGEILVFPRSIVKRMKKRGVLTEKNANDPENVGERSDLSSDRKMLQESS |
| | EEESDTYGEIGLSKSEAIFHWRNLCYEVQIKAETRRILNNVDGWVKPGTLTALMGASGAGKTTLL |
| | DCLAERVTMGVITGDILVNGIPRDKSFPRSIGYCQQQDLHLKTATVRESLRFSAYLRQPAEVSIEEK |
| | NRYVEEVIKILEMEKYADAVVGVAGEGLNVEQRKRLTIGVELTAKPKLLVFLDEPTSGLDSQTAWS |
| | ICQLMKKLANHGQAILCTIHQPSAILMQEFDRLLFMQRGGKTVYFGDLGEGCKTMIDYFESHGA |
| | HKCPADANPAEWMLEVVGAAPGSHANQDYYEVWRNSEEYRAVQSELDWMERELPKKGSITA |
| | AEDKHEFSQSIIYQTKLVSIRLFQQYWRSPDYLWSKFILTIFNQLFIGFTFFKAGTSLQGLQNQMLA |
| | VFMFTVIFNPILQQYLPSFVQQRDLYEARERPSRTFSWISFIFAQIFVEVPWNILAGTIAYFIYYYPIG |
| | FYSNASAAGQLHERGALFWLFSCAFYVYVGSMGLLVISFNQVAESAANLASLLFTMSLSFCGVM |
| | TTPSAMPRFWIFMYRVSPLTYFIQALLAVGVANVDVKCADYELLEFTPPSGMTCGQYMEPYLQL |
| | AKTGYLTDENATDTCSFCQISTTNDYLANVNSFYSERWRNYGIFICYIAFNYIAGVFFYWLARVPK |
| | KNGKLSKK |
| SEQ ID | ATGGCCTTGAGATCTTTCTGTTCTGCTGATGGTTCTGATCCATTGTGGGATTGGAATGTTACT |
| NO: 917 | TGGCATACTTCTAATCCAGATTTCACCAAGTGTTTCCAAAACACCGTTTTGACTTGGGTTCCAT |
| | GTTTTTACTTGTGGTCTTGCTTTCCCTTGTACTTCTTCTACTTGTCCAGACATGATAGAGGTTA |
| | CATCCAAATGACCCATTTGAACAAGACTAAGACTGCTTTGGGTTTCTTCTTGTGGATTATTTG |
| | TTGGGCCGATCTGTTTTACTCTTTCTGGGAAAGATCACAGGGTGTTTTGAGAGCACCAGTTTT |
| | GTTGGTTTCTCCAACTTTGTTGGGTATCACTATGTTGTTGGCTACCTTCTTGATTCAGTTGGAG |
| | AGAAGAAAAGGTGTCCAATCCTCTGGTATTATGTTGACTTTTTGGTTGGTTGCTTTGTTGTGC |
| | GCTTTGGCTATTTTGAGATCCAAGATTATTTCCGCCTTGAAAAAGGATGCCCACGTTGATGTT |
| | TTTAGAGACTCTACCTTCTACCTGTACTTCACCTTGGTTTTGGTTCAATTGGTTCTGTCTTGTTT |
| | CTCTGATTGCTCTCCTTTGTTCTCTGAAACCGTTCATGATAGAAATCCCTGTCCAGAATCTTCT |
| | GCTTCATTCTTGTCTAGAATTACCTTCTGGTGGATCACTGGTATGATGGTTCATGGTTATAGA |
| | CAACCCTTGGAATCTTCAGATTTGTGGTCCTTGAACAAAGAAGATACCTCCGAAGAAGTTGTT |
| | CCAGTTTTGGTTAACAACTGGAAGAAAGAATGCGACAAGTCCAGAAAACAACCAGTTAGAA |
| | TAGTTTACGCTCCACCAAAAGATCCATCTAAGCCAAAAGGTTCTTCCCAATTGGATGTTAACG |
| | AAGAAGTCGAAGCTTTGATCGTTAAGTCTCCACATAAGGATAGAGAGCCCTCTTTGTTTAAG |
| | GTGTTGTACAAAACTTTCGGCCCCTACTTTTTGATGTCCTTCTTGTATAAGGCCTTGCACGATT |
| | TGATGATGTTTGCTGGTCCAAAGATCTTGGAGCTGATTATTAACTTCGTCAACGATAGAGAA |
| | GCTCCAGATTGGCAAGGTTATTTCTATACTGCCTTGTTGTTTGTTTCCGCTTGCTTGCAAACTT |
| | TGGCATTGCATCAATACTTCCACATCTGTTTCGTTTCCGGTATGAGAATCAAAACTGCTGTTG |
| | TTGGTGCTGTTTACAGAAAGGCTTTGTTGATTACTAATGCCGCCAGAAAATCTTCTACTGTCG |
| | GTGAAATAGTCAACTTGATGTCTGTTGATGCCCAAAGATTCATGGATTTGGCCACTTACATTA |
| | ACATGATTTGGTCTGCTCCATTGCAAGTTATTCTGGCCTTGTATTTCTTGTGGTTGTCTTTGGG |
| | TCCATCAGTTTTGGCTGGTGTTGCTGTTATGATTTTGATGGTTCCATTGAACGCTGTTATGGC |
| | TATGAAAACTAAGACCTACCAAGTTGCCCATATGAAGTCTAAGGATAACAGGATCAAACTGA |
| | TGAACGAGATCTTGAACGGTATCAAGGTTTTGAAGTTGTACGCTTGGGAATTAGCCTTCCAA |
| | GATAAGGTCATGTCTATCAGGCAAGAAGAATTGAAGGTCTTGAAGAAGTCTGCTTATTTGGC |
| | TGCAGTTGGTACTTTTACTTGGGTGTGTACTCCATTCTTGGTTGCCTTGTCTACTTTTGCTGTT |
| | TTCGTTACTGTTGACGAGAGAAACATTTTGGATGCTAAGAAGGCTTTCGTTTCTTTGGCCTTG |
| | TTCAACATCTTGAGATTCCCATTGAACATCTTGCCAATGGTCATCTCTTCTATCGTTCAAGCTT |
| | CTGTCTCTTTGAAGAGATTGAGGATCTTCTTGTCCCACGAAGAATTGGAACCAGATTCTATCG |
| | AAAGAAGGTCCATTAAGTCTGGTGAAGGTAACTCTATTACCGTTAAGAACGCTACTTTCACAT |
| | GGGCTAGAGGTGAACCACCAACTTTGAATGGTATTACTTTCTCCATTCCAGAAGGTGCTTTA |
| | GTTGCAGTTGTTGGTCAAGTTGGTTGTGGTAAATCATCTTTGTTGTCTGCTTTATTGGCCGAA |
| | ATGGATAAGGTTGAAGGTCACGTTACTTTGAAAGGTTCTGTTGCTTATGTTCCACAACAAGC |
| | CTGGATTCAAAACGATTCTTTGAGGGAAAACATCTTGTTCGGTCACCCATTACAAGAGAATTA |
| | CTACAAAGCAGTTATGGAAGCTTGCGCTTTGTTGCCAGATTTGGAAATTTTGCCATCTGGTGA |
| | TAGAACCGAAATTGGTGAAAAGGGTGTTAATTTGTCTGGTGGTCAAAAGCAGAGAGTTTCTT |
| | TAGCTAGAGCTGTCTACTCTAACTCCGATATCTATTTGTTTGACGACCCATTGTCTGCAGTTGA |
| | TGCACATGTTGGTAAGCACATCTTTGAAAAAGTTGTAGGTCCAATGGGCCTGTTGAAGAACA |
| | AAACTAGAATTTTGGTTACCCACGGCATCTCTTATTTGCCACAAGTTGATGTTATCATCGTCAT |
| | GTCCGGTGGTAAGATTTCTGAAATGGGTTCCTACCAAGAGTTGTTGGATAGAGATGGTGCTT |
| | TTGCTGAATTCTTGAGAACTTACGCTAACGCTGAACAAGATTTGGCTTCTGAAGATGATTCTG |
| | TTTCCGGTTCTGGTAAAGAATCCAAGCCAGTTGAAAATGGTATGTTGGTTACTGATACAGTC |
| | GGTAAGCACTTGCAAAGACATTTGTCTAACTCCTCTTCTCATTCCGGTGATACTTCTCAACAAC |
| | ATTCCTCTATTGCCGAATTGCAAAAAGCTGGTGCTAAAGAAGAGACTTGGAAATTGATGGAA |
| | GCTGATAAGGCTCAAACAGGTCAAGTTCAATTGTCTGTTTACTGGAACTACATGAAGGCCAT |
| | TGGTTTGTTCATCACGTTCTTGTCCATTTTCTTGTTCTTGTGCAACCATGTTTCTGCTTTGGCTT |
| | CAAATTACTGGTTGTCATTGTGGACTGATGATCCACCTGTTGTTAATGGTACTCAAGCCAATA |
| | GAAACTTCAGGTTGTCAGTTTATGGTGCCTTGGGTATTTTACAAGGTGCTGCTATTTTCGGTT |
| | ACTCCATGGCTGTTTCTATCGGTGGTATTTTTGCTTCCAGAAGATTGCACTTGGACTTGTTGTA |
| | TAACGTGTTGAGATCTCCAATGAGCTTCTTTGAAAGAACTCCATCTGGTAACTTGGTCAACAG |
| | GTTCTCCAAAGAATTAGATACCGTTGACTCCATGATTCCACAAGTCATCAAAATGTTCATGGG |
| | CAGCTTGTTTTCAGTTATTGGTGCCGTTATTATCATCTTGTTGGCAACTCCAATTGCCGCTGTT |
| | ATTATTCCACCATTGGGTCTAGTTTACTTTTTCGTCCAGAGATTCTACGTTGCCTCATCTAGGC |
| | AATTGAAAAGATTGGAATCCGTGTCTAGATCCCCAGTTTACTCTCATTTTAACGAAACCTTGT |
| | TGGGTGTCTCCGTTATTAGAGCTTTTGAGGAACAAGAGAGATTCATCCACCAATCCGATTTG |
| | AAGGTTGACGAAAATCAAAAGGCTTACTACCCATCTATTGTCGCTAACAGATGGTTGGCTGT |
| | TAGATTAGAATGTGTTGGTAACTGCATCGTTTTGTTCGCTGCTTTGTTTGCTGTCATCTCTAGA |
| | CATTCTTTGTCTGCTGGTTTAGTTGGTTTGTCCGTTTCTTACTCCTTGCAAATTACCGCTTACTT |
| | GAACTGGTTGGTCAGAATGTCATCAGAAATGGAAACTAACATCGTTGCCGTCGAAAGGTTG |
| | AAAGAATACTCCGAAACTGAAAAAGAAGCCCCTTGGCAAATTCAAGAAACTGCTCCACCATC |
| | TACTTGGCCACATTCTGGTAGAGTTGAATTCAGAGATTACTGCTTGAGATACAGGGAAGATC |
| | TGGATTTGGTTCTAAAGCACATTAACGTTACCATCGAAGGTGGTGAAAAAGTCGGTATAGTT |
| | GGTAGAACAGGTGCTGGTAAATCTTCATTGACATTGGGTTTGTTTAGGATCAACGAATCTGC |
| | TGAAGGTGAAATCATTATCGACGGTGTTAACATTGCTAAGATCGGCTTGCATAATCTGAGAT |
| | TCAAGATCACTATCATCCCACAAGATCCCGTTTTATTCTCTGGTTCTTTGAGAATGAACTTGGA |
| | CCCATTCTCTCAATACTCTGATGAAGAGGTTTGGATGGCTTTGGAATTGGCTCATTTGAAGG |
| | GTTTTGTTTCAGCTTTGCCAGATAAGTTGAACCATGAATGTGCAGAAGGCGGAGAAAATTTG |
| | TCAGTAGGTCAAAGACAATTGGTTTGCTTGGCTAGAGCTTTGTTAAGAAAGACCAAAATCCT |
| | GGTCTTGGATGAAGCTACTGCTGCTGTTGACTTAGAAACCGATAACTTGATCCAATCCACCAT |
| | CAGAACTCAATTTGAGGATTGCACTGTTTTGACCATTGCTCATAGATTGAACACCATCATGGA |
| | TTACACCAGAGTTATCGTTTTGGACAAGGGTGAAGTTAGAGAATGTGGTGCTCCATCTGAAC |
| | TATTGCAACAGAGAGGTATTTTCTACTCTATGGCTAAAGATGCCGGTTTGGTTTGA |
| SEQ ID | MALRSFCSADGSDPLWDWNVTWHTSNPDFTKCFQNTVLTWVPCFYLWSCFPLYFFYLSRHDR |
| NO: 918 | GYIQMTHLNKTKTALGFFLWIICWADLFYSFWERSQGVLRAPVLLVSPTLLGITMLLATFLIQLERR |
| | KGVQSSGIMLTFWLVALLCALAILRSKIISALKKDAHVDVFRDSTFYLYFTLVLVQLVLSCFSDCSPL |
| | FSETVHDRNPCPESSASFLSRITFWWITGMMVHGYRQPLESSDLWSLNKEDTSEEVVPVLVNN |
| | WKKECDKSRKQPVRIVYAPPKDPSKPKGSSQLDVNEEVEALIVKSPHKDREPSLFKVLYKTFGPYF |
| | LMSFLYKALHDLMMFAGPKILELIINFVNDREAPDWQGYFYTALLFVSACLQTLALHQYFHICFVS |
| | GMRIKTAVVGAVYRKALLITNAARKSSTVGEIVNLMSVDAQRFMDLATYINMIWSAPLQVILALY |
| | FLWLSLGPSVLAGVAVMILMVPLNAVMAMKTKTYQVAHMKSKDNRIKLMNEILNGIKVLKLYA |
| | WELAFQDKVMSIRQEELKVLKKSAYLAAVGTFTWVCTPFLVALSTFAVFVTVDERNILDAKKAFV |
| | SLALFNILRFPLNILPMVISSIVQASVSLKRLRIFLSHEELEPDSIERRSIKSGEGNSITVKNATFTWAR |
| | GEPPTLNGITFSIPEGALVAVVGQVGCGKSSLLSALLAEMDKVEGHVTLKGSVAYVPQQAWIQN |
| | DSLRENILFGHPLQENYYKAVMEACALLPDLEILPSGDRTEIGEKGVNLSGGQKQRVSLARAVYSN |
| | SDIYLFDDPLSAVDAHVGKHIFEKVVGPMGLLKNKTRILVTHGISYLPQVDVIIVMSGGKISEMGS |
| | YQELLDRDGAFAEFLRTYANAEQDLASEDDSVSGSGKESKPVENGMLVTDTVGKHLQRHLSNSS |
| | SHSGDTSQQHSSIAELQKAGAKEETWKLMEADKAQTGQVQLSVYWNYMKAIGLFITFLSIFLFLC |
| | NHVSALASNYWLSLWTDDPPVVNGTQANRNFRLSVYGALGILQGAAIFGYSMAVSIGGIFASRR |
| | LHLDLLYNVLRSPMSFFERTPSGNLVNRFSKELDTVDSMIPQVIKMFMGSLESVIGAVIIILLATPIA |
| | AVIIPPLGLVYFFVQRFYVASSRQLKRLESVSRSPVYSHFNETLLGVSVIRAFEEQERFIHQSDLKVD |
| | ENQKAYYPSIVANRWLAVRLECVGNCIVLFAALFAVISRHSLSAGLVGLSVSYSLQITAYLNWLVR |
| | MSSEMETNIVAVERLKEYSETEKEAPWQIQETAPPSTWPHSGRVEFRDYCLRYREDLDLVLKHIN |
| | VTIEGGEKVGIVGRTGAGKSSLTLGLFRINESAEGEIIIDGVNIAKIGLHNLRFKITIIPQDPVLFSGSL |
| | RMNLDPFSQYSDEEVWMALELAHLKGFVSALPDKLNHECAEGGENLSVGQRQLVCLARALLRK |
| | TKILVLDEATAAVDLETDNLIQSTIRTQFEDCTVLTIAHRLNTIMDYTRVIVLDKGEVRECGAPSELL |
| | QQRGIFYSMAKDAGLV |
| SEQ ID | ATGAACGTTGAAGCCGCCAACGAAAAAGAATTGCTATTGCAAAAGAGGTCCCTGACTTTCTT |
| NO: 919 | GTACGGTAAAAATGTTCCACCATTGCCATTGGAAGAAGAGAGAAAAGTTTTTCCACATAGGC |
| | ACACCAACATTATCTCTAGAGCTTTGTTCTACTACTTGAACCCAATGTTGAGAGTCGGTTACA |
| | AAAGAACATTGCAACCACAAGATATGTACGTCTTGGATGAACGTGATTCTGTTGATGCTATG |
| | TACGACAAGTTCAGAAACTACTTGGATGTCGAATTGGATAAGGCTAGAGCCAAACATATCCA |
| | AAAGAAAAGAGAAGCTAGAGCCGAATTGGGTAACACTTCTACTGTTGATGAAGATACCGAC |
| | TTGGAAGATTTCGAATTGCCTTACATCGTTATCGTCAAGGGTTTGTTTCATTTGTTTGGTTGG |
| | CAGTATATGTGGGGCTCTTTGTTGAAAGTTTTCACCGATTTGTTTTACACCCTGATGCCATTG |
| | GTTCAAAAGAGATTGGTTAACTTCGTTGAAGAATCCGCTTACGGTTTCCATCCAACTTTAGGT |
| | AAAGGTGTTGGTTACTCTATTGGTGTCGGTTTGATGGTTTATTTCGCTGGTTTGTGTGTTAAC |
| | CACTTCGTCTACAACTCTATTACTGTTGGTGCTAAGTGTAAGGCTGTTTTGACTAAGTTGTTGT |
| | TGGAGAAGTCCTTCAGATTGGATGCTAGAGGTAAACATAAGTTCCCAGTTGGTAAGATCAAC |
| | TCCATTATGGGTACTGATTTGACCAGAGTTGATTTGGCTATTGGTTTCTTCCCAATCATCTTCG |
| | AATTCCCATTCTCCATTATCCTGTGCATCATCCTGTTGTTGGTTAACATTGGTGTTTCTGCTTTG |
| | GCCGGTATTTCCTTGTTCGTTGTTATTTTGTTGTTCACCTCCTACGTTGTCAGGGTCTTGTACA |
| | AAATGAGAGTTAGAGCTAACGTTTACACCGACCAAAGAGTTAATTTGGTCAAAGAGCTGCTG |
| | AAGAACTTCAAGATGGTTAAGATGTACGGTTGGGAGAACTCTTACTTCAAGCAATTTGTTGA |
| | CACCAGGCAGAAAGAAATGACCATCGTTTTGAGAATGCAGCACATCAGAAACTTTTTGGACG |
| | CTTTGTCTTTCTGGTTGCCAATTATTACCTCCATGGTTTCTTTCTTGGTGTTGTACCATTTGAGG |
| | AACAACAGAACAGTTGGTGACATCTTCTCTTCATTGACCTTGTTCCAAGAATTGACTGGTCAA |
| | TTTGCTATGGTTACCCCATCTTTGTCTATGGCTACTGATATGGTTGTCGGTTTTAAGAGAGTT |
| | GCCCAATTGATTTCTTGTCCAGATGCTCCAGCTTTGGAAGAATTTCATGATTTGTTGGACGAC |
| | GAAAAGTTGGCTTTGAAATTGGCTCATGCTTCTTTCAAGTGGCATACCTTCGAAGAATCTGCT |
| | ACTACTGAAGTTGTTATCGTCCCAGAATCTAAGACCTCTTCATCTAAAGATGCTTCCAGAACT |
| | GAATTTCCAGGCTTGCATGATTTGACGTTGTCTATTTCTAGAGGTGAATTCATCGTTGTTACC |
| | GGTGCAATTGGTTCTGGTAAATCTTCTTTGTTGTCCGCCATTTCTGGTTTCATGCCAAAAACTG |
| | GTGGTTCTGTTGCTAAGAACGGTAGTTTGTTGTTGTGTGGTTATCCATGGGTCCAAAATGCTA |
| | CTGTTAGAGAGAATATCTTGTTCGGTCAACCATTCGACCAAACTAAGTATGACGAAATCGTTA |
| | GAGTTTGCTCCTTGGATACTGATTTCGAGTTGTTTTCTGCTGGTGATATGACCGAAGTTGGTG |
| | AAAGAGGTATTACTTTGTCTGGTGGTCAAAAGGCTAGAATCAATTTGGCTAGAGCTGTTTAC |
| | TCCGATAGAGACATCATTTTGTTGGATGATGTTTTGTCTGCTGTTGACGCTAAGGTTGGTAAA |
| | CACATTATGGAACAATGCATCTTGGGTTACTTGAAGGGTAAGACTAGAATTTTGGCTACCCA |
| | CCAATTGTCCTTGATTAACGCTGCTGATAAGGTCATTTTCTTGAATGGTAACGGTTCCATCGA |
| | TTACGGTACATTGCATGAAGTTAGATCCAGAAACTCCGCCTTCATTAGATTGATGGAATTCTC |
| | TCATGACCCCGAAGAGGAACAAAGACCAGATGAAGCTGACGAAAAGAAAGAGGATGAATT |
| | GAAGGCTGAAAAAGAAGAGGACGGTAAATTGATGAGAGATGAAGAAAGAGCCGTCAACTC |
| | TATCTCTAAGAATGTTTACTCTACCTACATCTTGTCCGGTTCAGGTAAATTGGGTTATTTGTTC |
| | CCAATCCTGATTTTGTTCGCTTGTGCTGTTTCTACCTTCTCTGATTTGTTCACTAACAACTGGTT |
| | GTCCTTCTGGCAAGATAAGAAGTTTAGAAAGCCACCAGGTTTCTACCAAGGCATCTATATTTT |
| | GTTAGGCTTCTCCACCTTGCTGTTGTTGACTTTTTACTTCGCTTTGATCGTCCAGTTCTGTAAC |
| | AAAGCTGCTAATCAATTCAACACCTCCGCTTTCCAAAATTTGTTGCATGCTCCAATGTCCTTCA |
| | TTGATACAACTCCAATGGGTAGAGTCTTGAACAGATTCACTAAGGATTCCGATGTTTTGGAC |
| | AACGAGATCCAATCTCAATTCAGGATGTTCATTCAAGAGTTTTCCGTTGTTGTCGGCACCTTG |
| | ATTTTGTGCATTATCTATTTGCCATGGTTCGCTATTGCCATTCCAGTTATGATAGTTGCCTATT |
| | ACTTGATCGCCAACTTCTACTTGGCTTCCTCTAGAGAAATCAAAAGATTGGAAGCCGTCAAG |
| | AGATCCGAAGTTTATTCTCATTTTAACGAGGCCTTGTCTGGTTTGGATACAATCAAAGCTCAT |
| | TCCAGCTCTGAAAGGTTCATGGAAACTAACTCCAGATTGATCGACCAAATGAACGAATCCTA |
| | CTTCACTTTCGTTGCTGTTCAAAGATGGTTGGCTTGCAACTTGGATATCATGGTTTCCTTCATG |
| | TGCTTGTTCATCTGCCTGTTGTGTTCCTTCAGAATCTTCCATATTAGAGGTGCTTATGCTGGTT |
| | TGCTATTGACCTGTGTTTTTAACATCGTCGGCATGTTGTCTTACATGTTAAGAGCCATGACCG |
| | AAATCGAGAATCAAATGAACTCTGTCGAAAGGTTGAAGTTTTACGCTGTCGACTTAGAACAA |
| | GAAGCCCCATTTGATATCCCTGAAAGAAATCCATCTCCATTGTGGCCTCAAAGAGGTGCTATT |
| | TGTTTTTCTAACGTCACCATGTCCTATAGAGAAGGTTTGCCACCAGCTGTTAGAAACTTGTCT |
| | TTGGATGTTGCCGGTGGTGAAAAGATAGGTGTTTGTGGTAGAACTGGTGCAGGTAAATCAT |
| | CCGTTATGTACAGCTTGTTTAGATTGGCTGAATTCGATGGTAGAATCACCATTGATGATGTG |
| | GACATTTCTAAAATCGGCTTGCACAAGTTGAGAACCTCATTGTCTATTATCCCACAAGATCCA |
| | GTTTTGTTCTCCGGTAATATCAGGTCTAATTTGGACCCTTTCCAAGAACACTCTGATGATAATT |
| | TGTGGGATGCTTTGTCTAAAGCCGGTTTGGTTGAAACTGATGCTTTGGATTTGGTTAAGCAC |
| | CAGACTAAGTCTGATAGGAACTTGCATAAGTTTCACTTGGCCAGATTGGTTGAAGATGATGG |
| | TTCTAATTTCTCCTTGGGTGAACGTCAATTATTGGCTTTGGCAAGAGCTTTGGTTAGAGGTTC |
| | TAAGATCTTGGTTTTGGATGAAGCTACTTCCTCCGTTGATTACGAAACAGATGCTAAAGTCCA |
| | AAAGACCATCACTAATGAATTCGCTGATTGCACCGTTTTGTGTATTGCCCATAGATTGAAAAC |
| | CATCGTCAAGTACGATAGGATTATGGTCTTGGACAAAGGTGAAATCGTCGAATTAGGTAAGC |
| | CAATCGAACTGTATCAACACGACGGTATTTTTAGGTCTATGTGCGAAAAGTCCGGTATTACTA |
| | GAGCTGACTTCGATATCTGA |
| SEQ ID | MNVEAANEKELLLQKRSLTFLYGKNVPPLPLEEERKVFPHRHTNIISRALFYYLNPMLRVGYKRTL |
| NO: 920 | QPQDMYVLDERDSVDAMYDKFRNYLDVELDKARAKHIQKKREARAELGNTSTVDEDTDLEDFE |
| | LPYIVIVKGLFHLFGWQYMWGSLLKVFTDLFYTLMPLVQKRLVNFVEESAYGFHPTLGKGVGYSI |
| | GVGLMVYFAGLCVNHFVYNSITVGAKCKAVLTKLLLEKSFRLDARGKHKFPVGKINSIMGTDLTR |
| | VDLAIGFFPIIFEFPFSIILCIILLLVNIGVSALAGISLFVVILLFTSYVVRVLYKMRVRANVYTDQRVNL |
| | VKELLKNFKMVKMYGWENSYFKQFVDTRQKEMTIVLRMQHIRNFLDALSFWLPIITSMVSFLVL |
| | YHLRNNRTVGDIFSSLTLFQELTGQFAMVTPSLSMATDMVVGFKRVAQLISCPDAPALEEFHDLL |
| | DDEKLALKLAHASFKWHTFEESATTEVVIVPESKTSSSKDASRTEFPGLHDLTLSISRGEFIVVTGAI |
| | GSGKSSLLSAISGFMPKTGGSVAKNGSLLLCGYPWVQNATVRENILFGQPFDQTKYDEIVRVCSL |
| | DTDFELFSAGDMTEVGERGITLSGGQKARINLARAVYSDRDIILLDDVLSAVDAKVGKHIMEQCIL |
| | GYLKGKTRILATHQLSLINAADKVIFLNGNGSIDYGTLHEVRSRNSAFIRLMEFSHDPEEEQRPDEA |
| | DEKKEDELKAEKEEDGKLMRDEERAVNSISKNVYSTYILSGSGKLGYLFPILILFACAVSTFSDLFTN |
| | NWLSFWQDKKFRKPPGFYQGIYILLGFSTLLLLTFYFALIVQFCNKAANQFNTSAFQNLLHAPMSF |
| | IDTTPMGRVLNRFTKDSDVLDNEIQSQFRMFIQEFSVVVGTLILCIIYLPWFAIAIPVMIVAYYLIAN |
| | FYLASSREIKRLEAVKRSEVYSHFNEALSGLDTIKAHSSSERFMETNSRLIDQMNESYFTFVAVQR |
| | WLACNLDIMVSFMCLFICLLCSFRIFHIRGAYAGLLLTCVFNIVGMLSYMLRAMTEIENQMNSVE |
| | RLKFYAVDLEQEAPFDIPERNPSPLWPQRGAICFSNVTMSYREGLPPAVRNLSLDVAGGEKIGVC |
| | GRTGAGKSSVMYSLFRLAEFDGRITIDDVDISKIGLHKLRTSLSIIPQDPVLFSGNIRSNLDPFQEHS |
| | DDNLWDALSKAGLVETDALDLVKHQTKSDRNLHKFHLARLVEDDGSNFSLGERQLLALARALVR |
| | GSKILVLDEATSSVDYETDAKVQKTITNEFADCTVLCIAHRLKTIVKYDRIMVLDKGEIVELGKPIELY |
| | QHDGIFRSMCEKSGITRADFDI |
| SEQ ID | ATGGACACCTCCTCCAAAGAAAACATCAGGTTGTTTTCCAAGAACTCCATGCAACCAGTTGGT |
| NO: 921 | AGATTGTCTTTCAAAACTGAGTACCCATCCTCTGAAGAAAAGCAACCATGTTGTTGTCAGCTG |
| | AAAGTTTTCTTGGGTGCTTTGTCTTTTGTTTACTTCGCTAAAGCTTTGGCCGAAGGTTACTTGA |
| | AGTCTACTATTACCCAAATCGAACGTAGATTCGACATCCCATCTTCATTGGTTGGTATTATCG |
| | ATGGTTCCTTCGAAATCGGTAACTTGTTGGTTATTGCCTTCGTTTCTTACTTCGGTGCTAAATT |
| | GCATAGGCCAAAGATTATTGGTGCTGGTTGTTTGATTATGGGTGTCGGTACTTTGTTGATTGC |
| | TACTCCACATTTCTTCATGGAACAGTACAAGTACGAAAGATACTCTCCAGCTTCTAACTCCAC |
| | CTTGTCTATTTCTCCATGTTTGTTGGACAGCAACAACTCTTTGCCAATTCCAGCTGTTGAAAAG |
| | TCCCAATCCAAGATTAACAACGAATGCCAAGTTGATGCCTCTTCTTCTATGTGGGTTTATGTC |
| | TTTTTGGGCAACTTGTTGAGAGGTTTTGGTGAAACTCCAATTCAACCATTGGGTATTGCTTAC |
| | TTGGATGATTTCGCTTCTCAAGATAATGCCGCTTTCTACATTGGTTGTGTTCAAACCGTTGCTA |
| | TTATCGGTCCAATTTTCGGTTTCTTGTTGGGTTCTTTGTGTGCTAAGTTGTACGTTGATACTGG |
| | TTTCGTTAACTTGGATCACATTACTATCACTCCAAAGGATCCACAATGGGTTGGTGCTTGGTG |
| | GTTGGGTTATTTGATTGCTGGTTCTATTACCTTGTTGGCTGCTGTTCCATTTTGGTGTTTGCCT |
| | AGAACTTTGCCAAGACCAAGATCTAGAGAAGATTCCTCTTCCTCCTCGGAAAAATCCAAGTTC |
| | ATTATGGATGACTTGACCGACTATCAAACTCCACCAGGTGAAAAAGCTAAGATTATGGAAAT |
| | GGCCAGAGACTTCTTGCCATCTTTGAAATCTTTGTTTGGTAACCCCGTCTACTTCTTGTACTTG |
| | TGTGCTTCTACTGTGCAGTTCAATTCTTTGTTCGGTATGGTTACTTACAAGCCCAAGTACATCG |
| | AACAACAATATGGTCAATCTGCTTCCAAGGCCAATTTCGTTATTGGTTTGATTAACATTCCAG |
| | CCGTTGCCTTGGGTATTTTCTCTGGTGGTATCATTATGAAGAAGTTCAGAGTCTCTATTAGAG |
| | GTGCTGCAAAGTTGTATTTGGGTTCATCTGTTTTGGGCTATCTGCTGTTTTTGTCCTTGTTTGC |
| | TTTGGGTTGTGAAAACTCTGATGTTGCTGGTTTGACCATTTCTTACCAAGGTACAAAACCAGT |
| | CTCTTACCACGAAAGAGCTTTGTTTTCTGATTGCAACTCTAGATGCAAGTGCTCTGAAACAAA |
| | ATGGGAACCTATTTGTGGTGAGAACGGTATTACTTATGCTTCTGCTTGTTTGGCTGGTTGTCA |
| | AACTTCTACAAGATCTGGTAAGACCACCATTTTCAACAACTGTACATGTGTTGGTTTGGCTGC |
| | TTCTAAGTCTGGTAATTCTTCTGGTATGGTCGGTAGATGTCAAAAGGATAATGGTTGTGCTA |
| | AGATGTTCCTGTACTTCTTGATTATTGCCGTCATTACCTCCTACACTTTGTCTGTTGGTGGTAT |
| | TCCAGGTTACATCTTGTTGTTGAGATGCATCAAACCACAGTTGAAGTCTTTCGCTTTGGGTAT |
| | CTATACTTTGGCCGTTAGAGTTTTGGCAGGTATTCCATCTCCAATCTATTTCGGTGTTTTGATC |
| | GATACCTCTTGTTTGAAGTGGGGTTTTAAGAGATGTGGTACTAAGGGTTCTTGTAGGTTGTA |
| | CGATTCTAATGCCTTCAGACATATCTACCTGGGTTTGACTATGATGTTGGGTATCATGTCCAT |
| | CTTTTTGTCTACCGCTGTTTTGTTCACCCTGAAGAAGAACTACGTTTCTAAGCACAGATCCTTC |
| | AGAACTAAGAGGGAAAGAACTATGGTTTCCACCAGGATCAGAAAAGAAAACTGTACTACCA |
| | ACGATCACTTGTTGCAACCTAATTATTGGCCAGGTAAAGAAACCCAGTTGTAA |
| SEQ ID | MDTSSKENIRLFSKNSMQPVGRLSFKTEYPSSEEKQPCCCQLKVFLGALSFVYFAKALAEGYLKSTI |
| NO: 922 | TQIERRFDIPSSLVGIIDGSFEIGNLLVIAFVSYFGAKLHRPKIIGAGCLIMGVGTLLIATPHFFMEQY |
| | KYERYSPASNSTLSISPCLLDSNNSLPIPAVEKSQSKINNECQVDASSSMWVYVFLGNLLRGFGET |
| | PIQPLGIAYLDDFASQDNAAFYIGCVQTVAIIGPIFGFLLGSLCAKLYVDTGFVNLDHITITPKDPQ |
| | WVGAWWLGYLIAGSITLLAAVPFWCLPRTLPRPRSREDSSSSSEKSKFIMDDLTDYQTPPGEKAK |
| | IMEMARDFLPSLKSLFGNPVYFLYLCASTVQFNSLFGMVTYKPKYIEQQYGQSASKANFVIGLINIP |
| | AVALGIFSGGIIMKKFRVSIRGAAKLYLGSSVLGYLLFLSLFALGCENSDVAGLTISYQGTKPVSYHE |
| | RALFSDCNSRCKCSETKWEPICGENGITYASACLAGCQTSTRSGKTTIFNNCTCVGLAASKSGNSS |
| | GMVGRCQKDNGCAKMFLYFLIIAVITSYTLSVGGIPGYILLLRCIKPQLKSFALGIYTLAVRVLAGIPS |
| | PIYFGVLIDTSCLKWGFKRCGTKGSCRLYDSNAFRHIYLGLTMMLGIMSIFLSTAVLFTLKKNYVSK |
| | HRSFRTKRERTMVSTRIRKENCTTNDHLLQPNYWPGKETQL |
| SEQ ID | ATGGCTGCCTTGGATAGAGAAAGATTGAGAAGATTATTGCCCTACTTGGGTAGAGATAGAA |
| NO: 923 | GAAGGTTGTTGGTTACCTTGGTTTTGTTGATTCCAGTTGCTGGTGCTGCTGCTATTCAACCAT |
| | TATTGGTTGGTCAAGTTATCGCCGTTTTGAGAGGTGAACCTACTTTGACATTTTTGACTGGTA |
| | TGCCAGTTCCACAAGCCTTGAGATTATTAGTTTTGGTTTTATTGGGTGCCGTCTTGTTGAGAT |
| | TGGCTTTACAAGGTTTACAGTCCTACTCTGTTCAAGCTGTTGGTCAAAGATTGACCGCTAGAA |
| | TTAGAGATGATTTGTTCGCTCATGCTATGGCCTTGTCTTTGAGATTTCATGATAGAACTCCAG |
| | TCGGTAAGTTGTTGACTAGATTGACTTCTGATGTTGATGCTTTGGCTGAAGTTTTTGGTTCTG |
| | GTGCTGTTGGTGTTTTAGCTGATTTGGTTACTTTGTTGGTCATTGCCTTGACCATGTTGTCTAT |
| | TGAATGGCGTTTGGGTTTGCTGTTGTTGTGTTCTCAAGTTCCAGTTGTTTTGGGTATGTTGTG |
| | GTTGCAAAGAAGATACAGAAGGGCTAACTACAGAGTCAGAGAAGAATTGTCTCAATTGAAC |
| | GCTGACTTGCAAGAAAACTTGCAAGGTTTGGAAGTTGTCCAGATGTTCAGAAGAGAAAGAG |
| | TTAATTCTGCTAGATTCGCTAGAACTACCGATGCTTATAGACAAGCTGTTACCGGTACTATCT |
| | TTTACGATTCTGCTATTTCCGCCTTCATTGAATGGGTTGCTTTGGTTGCTGTTGCATTGGTTTT |
| | GGCTTTAGGTGGTTCTATGGTTACAGCTGGTGCTTTAGGTTTGGGTACTTTGACTACTTTCAT |
| | CTTGTACTCCCAAAGGTTGTTCGATCCATTAAGACAATTGGCTGAAAGATTCACCCAAATCCA |
| | AGGTGGTTTGACTGCTGTTGAAAGAATCGGTGAATTATTGGAACAGCCAATCGAAATCCAAG |
| | AATTGCCAGCTTCTCAAAGATCTGCTGCAGCTAGAAGATCTGGTGGACAAAGATCATCTGCT |
| | GGTGAAGTTGTTTTCGAACATGTTTCTTTCGCCTACAGACAAGATGATCCAATTTTGACCGAT |
| | CTGTCCTTTAGAATTGCTCCAGGTGAACATGTTGCATTAGTTGGTCCAACAGGTTCTGGTAAG |
| | ACTACTGTTATTAGATTGCTGTGCAGGTTGTACGAACCTCAACAAGGTAGAATTTTGTTGGAT |
| | GGTATCGACATTAGGGAATTGCCTATTCCAACTTTGAGACAAAGATTGGGTGTTGTATTGCA |
| | AGACACCTTTTTGTTCTCTGGTAACGTTGCCGATAATTTGAGATTAGATGCTCCAATTGCCAA |
| | CGATGAATTGGCCCAATTGTGTAGAGAATTGGGTTTAGATCCTCTGCTAAGAAGATTGCCAG |
| | AAGGTTTGGCTACTGAATTGAGAGAACGTGGTGGTAATTTGTCATCTGGTGAAAGACAATTA |
| | TTGGCCGTTGCTAGAGTTGCTATTAGAGATCCATCTGTTTTGGTTATGGATGAAGCTACTGCA |
| | TTTTTGGATCCATCTACTGAAGCTACCTTGCAACAAGATTTGGATAGATTGCTACAACAAAGA |
| | ACCGCTATCGTTATTGCTCATAGATTGGCAACTGTTGAAGCTGCTGATAGAATATTGGTATTG |
| | CAGAGAGGTAGATTGATCGAACAGGGTACTCATAGACAATTGAGAGCTGCTGGTGGTCTAT |
| | ATGCTAGATTAGCTGAATTACAGGATAAGGGTTTAGCTGCCTTGTGA |
| SEQ ID | MAALDRERLRRLLPYLGRDRRRLLVTLVLLIPVAGAAAIQPLLVGQVIAVLRGEPTLTFLTGMPVP |
| NO: 924 | QALRLLVLVLLGAVLLRLALQGLQSYSVQAVGQRLTARIRDDLFAHAMALSLRFHDRTPVGKLLTR |
| | LTSDVDALAEVFGSGAVGVLADLVTLLVIALTMLSIEWRLGLLLLCSQVPVVLGMLWLQRRYRRA |
| | NYRVREELSQLNADLQENLQGLEVVQMFRRERVNSARFARTTDAYRQAVTGTIFYDSAISAFIE |
| | WVALVAVALVLALGGSMVTAGALGLGTLTTFILYSQRLFDPLRQLAERFTQIQGGLTAVERIGELL |
| | EQPIEIQELPASQRSAAARRSGGQRSSAGEVVFEHVSFAYRQDDPILTDLSFRIAPGEHVALVGPT |
| | GSGKTTVIRLLCRLYEPQQGRILLDGIDIRELPIPTLRQRLGVVLQDTFLFSGNVADNLRLDAPIAND |
| | ELAQLCRELGLDPLLRRLPEGLATELRERGGNLSSGERQLLAVARVAIRDPSVLVMDEATAFLDPS |
| | TEATLQQDLDRLLQQRTAIVIAHRLATVEAADRILVLQRGRLIEQGTHRQLRAAGGLYARLAELQ |
| | DKGLAAL |
| SEQ ID | ATGAACTCCGTTGAATCCGCCGATAAGAACTATGTTATAGTTTCCGATGGTTCCGAGAAGTT |
| NO: 925 | GTCTCCAGTTCCACCATTGCAAAGAAGATTATTGACTCCATTCCTGTCCAAAGAAGTTCCACC |
| | TATTCCAGTTGATGAAGAAAGAGTTAAGTACCCCTACTTGATGACTAACCCATTCTCTACTGT |
| | TTTCTTCACTTGGTTGAACCCTTTGTTGAAGGTTGGTTACAAGAGAACTTTGTCCCCAAACGA |
| | TTTGTTCAAGATTGCTGATAAGGATGCCTTGGATTACACTTACTCTACCTTCGAAAGACACTT |
| | GGACGAAATCATCCAAAAGGATAGAGATGCCTTGAAGTTGAGAGATCCATCTATTACCGAA |
| | GAAGAATTGGAAGCTAGAGAGTATCCAAAGAACGCTATTTTGAAGGCCTTGCTGAAAACTTT |
| | CAAGTGGGAATATTCTTTCGCCGTGTTCTTCAAGTTGTTGTCTGATACTGCTCAAGTTTTGACT |
| | CCCTTGTTGTCTAGAGCTTTGATTACTTACGTTCAAGACAAGACTGTTGATCCAGGTTTGCCA |
| | GTTAACAATGGTGTTGGTTATGCTATTGGTGTCACTTTCATGTTGGCTGTTACTACTTTGTGTA |
| | CCAACCACTTCTTGTACTTGTCTTTGACCGTTGGTTTACATGCCAAGTCTATTTTGACTACCGC |
| | TGTCTTGAAGAAGTCTTTCAAAGCTTCATCTGTTACCAGACATACTTTCACCAATGGTAGAGT |
| | TACCTCCTTGATTTCTGCTGATTTGGCTAGAGTTGATTTGGCCTTTGGTTTTCAACCATACGTT |
| | ATTACTGCACCCGTTCCAATTATCGTTACCATTGCTTTGCTGATCATCAACATCGGTGTTTCTT |
| | CATTGGCTGGTATTGCTATGTTTTTGGTTGCCTTGTTTGTTATTGGTGCTTGTTCTGGTGCTTT |
| | GATGGCTTTGAGAAAGAAGGTTAACAAGTTCACCGACTCCAGAATCTCTTACATGAGAGAAA |
| | TCTTGCAGAACATGAAGATCATCAAGCTGTACTCTTGGGAAGATGCTTACGAAAAGACTGTT |
| | ACTGACGAAAGAAACAACGAAATCGGTGTCATGTTGAAGATGGTGTCTGTTAGAAACTTTTT |
| | GATGGCCTTCGCTATCTCTTTGCCATCTGTTGTTTCTATGGTTGCTTTCTTGGTCTTGTACGGT |
| | GTTTCCCAAGATCAAAATCCAGCCAATATTTTCACCTCCTTGTACCTGTTTAGTTTGTTGGCTG |
| | GTCAAATCATGATGGTTCCAATGGCTTTGTCTACTGCTACTGATGCTAAAATCGGTTTGGAAA |
| | GATTGAGGTTGTACTTGCAATCTGGTGAAGTTCAATCTAACGATGATGACAAAGGTGAAGAT |
| | GGCACTAATTCTTTGCCAGAAGATGTTGCTATTCAAGTTACCAACGCTTCCTTCATTTGGGAA |
| | AAGTTCGAAGATGAAGATAACGAAGCTGAAGAAACTCCAGAAACCACCTCTTCTATTGAAAG |
| | ATTGGACGAATTGTCTAAGCACGACTTTGAAGGTTTCTCCAACATCAACTTCTCCATCAAGAA |
| | GTCCGAAGTTGTTTTGATTACAGGTCCAATCGGTTCCGGTAAATCATCTTTGTTGTTGGCTTT |
| | AGCAGGTCAAATGACTAAGACTTCCGGTTCTTTGAAAACTGCTGGTTCTTTGTTATCTGCTGG |
| | TCAACCATGGATTCAAAACGCTACTGTCAAAGAAAACATCTTGTTCGGTGAACCATTCAACCA |
| | GGATAGATACCAACAAGTTGTTAGAGTTTGCGCTTTGGAAGATGACTTGCAGTCTTTTACTG |
| | CTGGTGATGCTACTGAAGTAGGTGAAAGAGGTATTACTTTGTCCGGTGGTCAAAAGGCTAG |
| | AATCAATTTGGCAAGAGCTGTTTACGCTAACAAGGACATTATCTTGTTGGATGATGTTTTGTC |
| | CGCTGTCGATTCTAGAGTTGGTAAGATTATCGTTGACGAGTGCTTCAAGAAGTTCTTGCGTA |
| | AAAAGACTATCGTTTTGGCTACCCACCAATTGTCTTTGGTTCATTTTGCTGATAGAGCCATCTT |
| | CTTGAACGGTGATGGTTCTATTAACATCGGTACTGTCGAAGAATTGTCCAAAACTTCTTCTGG |
| | CTTCCTGAAGCTAATGGAATACTCTTCTAGACCAGATTCCGATACCTCTAATGATGGTCAAAA |
| | CGAAAAGTTGGAGGGTATCTTGTCAGGTAAGTCTGTTCATCATAACCCACAAGAATCCACCT |
| | TGATTGAAGATGAGGAAAGAGCAGTTAACGCCATTGAATGGTCTGTTTACAAAGCCTACTTG |
| | CATGAAGGTCAAGGTAAATTTGGTGTTTTCGCCATTCCATTGATTGCCATGTTTATGACCTTT |
| | GACGTTTTCTTGACCATCTTCGTTAATGTCTGGTTGACCTACTGGATTAACGATTCATTTCCAG |
| | GTAGATCTGACGGTTTCTACATTGGTTTTTACGTTATGTTCGTCGTCTTGTCTATCGTTGCTAT |
| | CTCCTCTGAATTCATTATGATGGGCTACTTTTTCAGCACTGCATCTAGAAGGTTATACCTGAA |
| | GGTTTTGAAAAGAGTCTTGCATACCCCAATGCACTACTTGGATGTTACTCCAATGGGTTGTGT |
| | TTTGAACAGATTCACTAAGGATACCGACTCATTGGATAACGAAATTGGCCAAGAATTGACCA |
| | TGTTGGTTTATCCAGGTGCAATTTTGACCGGTACTGTTATTTTGTGCGTTGTTTACTTGCCATG |
| | GTTCGCTATTGCTTTACCACCATTATTGGTTGTTACCACTGCTACTACCAATTTCTACGTTGCTT |
| | CTTCCAGAGAAGTCAAGAGAATTGAAGCCTTGCAAAGATCCCATGTGTTCAACAACTTACAC |
| | GAAATTTTGAACGGCTTGCAAACCTTGAAAGCTTACAATGCTTTGGAAAGGTTCATGGACAA |
| | AAACAAGCACTTGATCGACAGAATGAACGAAGCCTACATTTTGGTTATCGCCAATCAGAGAT |
| | GGATCAGCATTCATTTGGAACTGGTTTCTTGCTTGTTGGTTTTGGTTGTTGCTCTGTTGTCTGT |
| | GTTCAGAGTGTTCAATATTAACGCTGCTTCTGTCGGCTTGATTATCAACTACGTTATGCAAGT |
| | TGCTACCTTCATGTCCTTGGTTATGAGATCTTACACCTCTGTCGAAAACGAGATGAATTCTGT |
| | TGAAAGGTTGTGCTTCTACGCCCATGATTTGGAACAAGAACCACCATATAGAATCAACGAAA |
| | CTAGACCAAGACCATCTTGGCCAGAACATGGTGCAATAGAATTTCAGAACGTGTCCATGAGA |
| | TACAGATATGGTTCTCCATTGGTCTTGAGGAACTTGTCCATTTCTGTAAAAGGTGGTGAAAA |
| | GATCGGTATTTGTGGTAGAACTGGTGCTGGTAAATCCTCCATTATGAACGTCTTGTTCAGATT |
| | GTCAGAACCAGCTGAAGGTACTGTTTTGATCGATGGTGTTGATACTTCTAAGTTGGGCTTGT |
| | ACGATTTGAGGTCCAAGTTGTCTATTATTCCACAAGATCCAGTGTTGTTCAGGGGTACTATTA |
| | GAAAGAATTTGGACCCATTCGAACAGTCCGAAGATTCTGCTTTGTGGGAAGCTTTAAGAAAG |
| | GCTGGTTTGATTGATACCGACGTTTTGAGAAAAGCCATTTCTCAACATCCAGATGATCCAAAC |
| | AGACACAAGTTCCATTTGGATCAATTGGTTGAGGATGACGGTTCTAATTTCTCTAATGGTGA |
| | AAGACAGTTGATCGCTTTAGCTAGAGCATTGGTTAGAGACTCCAAGATCTTAGTTTTAGATG |
| | AAGCCACCTCCTCCGTTGATTACGAAACAGATGCAAAAATCCAGAACACTATCGCCGAAGAA |
| | TTCTCTGAATGTACCATTTTGTGCATTGCCCACAGATTGAACACCATTTTGAACTACGATAGG |
| | ATCCTGGTCTTAGAACAAGGTAAGGTTGAACAATTTGATACCCCATGGGCTTTGTTTAACCA |
| | GGATGGTATTTTCAGACAGATGTGCGAAAGATCTGGTATCAAGTCATCAGAAAGATTGTCTC |
| | AGAACTGGTCCTTGAGATTGGATGGTGCTTAA |
| SEQ ID | MNSVESADKNYVIVSDGSEKLSPVPPLQRRLLTPFLSKEVPPIPVDEERVKYPYLMTNPFSTVFFT |
| NO: 926 | WLNPLLKVGYKRTLSPNDLFKIADKDALDYTYSTFERHLDEIIQKDRDALKLRDPSITEEELEAREYP |
| | KNAILKALLKTFKWEYSFAVFFKLLSDTAQVLTPLLSRALITYVQDKTVDPGLPVNNGVGYAIGVTF |
| | MLAVTTLCTNHFLYLSLTVGLHAKSILTTAVLKKSFKASSVTRHTFTNGRVTSLISADLARVDLAFGF |
| | QPYVITAPVPIIVTIALLIINIGVSSLAGIAMFLVALFVIGACSGALMALRKKVNKFTDSRISYMREIL |
| | QNMKIIKLYSWEDAYEKTVTDERNNEIGVMLKMVSVRNFLMAFAISLPSVVSMVAFLVLYGVSQ |
| | DQNPANIFTSLYLFSLLAGQIMMVPMALSTATDAKIGLERLRLYLQSGEVQSNDDDKGEDGTNSL |
| | PEDVAIQVTNASFIWEKFEDEDNEAEETPETTSSIERLDELSKHDFEGFSNINFSIKKSEVVLITGPIG |
| | SGKSSLLLALAGQMTKTSGSLKTAGSLLSAGQPWIQNATVKENILFGEPFNQDRYQQVVRVCAL |
| | EDDLQSFTAGDATEVGERGITLSGGQKARINLARAVYANKDIILLDDVLSAVDSRVGKIIVDECFKK |
| | FLRKKTIVLATHQLSLVHFADRAIFLNGDGSINIGTVEELSKTSSGFLKLMEYSSRPDSDTSNDGQN |
| | EKLEGILSGKSVHHNPQESTLIEDEERAVNAIEWSVYKAYLHEGQGKFGVFAIPLIAMFMTFDVFL |
| | TIFVNVWLTYWINDSFPGRSDGFYIGFYVMFVVLSIVAISSEFIMMGYFFSTASRRLYLKVLKRVLH |
| | TPMHYLDVTPMGCVLNRFTKDTDSLDNEIGQELTMLVYPGAILTGTVILCVVYLPWFAIALPPLLV |
| | VTTATTNFYVASSREVKRIEALQRSHVFNNLHEILNGLQTLKAYNALERFMDKNKHLIDRMNEAYI |
| | LVIANQRWISIHLELVSCLLVLVVALLSVFRVFNINAASVGLIINYVMQVATFMSLVMRSYTSVENE |
| | MNSVERLCFYAHDLEQEPPYRINETRPRPSWPEHGAIEFQNVSMRYRYGSPLVLRNLSISVKGGE |
| | KIGICGRTGAGKSSIMNVLFRLSEPAEGTVLIDGVDTSKLGLYDLRSKLSIIPQDPVLFRGTIRKNLD |
| | PFEQSEDSALWEALRKAGLIDTDVLRKAISQHPDDPNRHKFHLDQLVEDDGSNFSNGERQLIALA |
| | RALVRDSKILVLDEATSSVDYETDAKIQNTIAEEFSECTILCIAHRLNTILNYDRILVLEQGKVEQFDT |
| | PWALFNQDGIFRQMCERSGIKSSERLSQNWSLRLDGA |
| SEQ ID | ATGACCTCCAAAGAAACCTCTATGGGCTTGCAAGTTGATGATGATTCTCCATTGCCAGAATTG |
| NO: 927 | GAGAGAAGATTGATGACTCCATTCTTGTCTAAAACGGTTCCACCAATTCCAAAAGAAAACGA |
| | AAGATTGCCATACCAATTGAACCATGCCAACTTCATCTCCAAGATATTTTTCTGGTGGCTGAA |
| | CCCAATTATGAACGTTGGTTACAAGAGAACTTTGACCCCAAATGACTTGTACTACGTTGAAAA |
| | CGATTTGACCGCTAAGCAAAACTACGATGACTTCATGATCAACCTGAACAAGGTTTTGTCTAA |
| | GGCTAAATTGAAGGCCAAGTTGAAGAACCCAGAATTGACCGATGATGAATTGGACGAATTG |
| | CCTTATCCTAAGTTCTCCTTGGTTATTGCTTTGCTGATGACCTTCAAGTACAAGTACTCTAAGG |
| | CTGTGTTCTTCAAGTTGTTGTCCGATATCTCTCAAGTCTTGAATCCTTTGTTGACCAAGGCTTT |
| | GATTAACTTCGTTGAGAAAAAGACCTACTTGCCAGATACTCCAGTTGGTAAAGGTATTGGTT |
| | ATGCCATTGGTGTTTCTGCTATGTTGGTTGCTAATGGCATTTTCCTGAACCATTTCTTGCACAA |
| | CTCTATGAATGTTGGTGCCCAATCCAAGTCTATTTTGACTACTGCTTTGTTGAAGAAGTCCTTC |
| | AAAGCTACTCCAAAGACTAAGCACACTTACACCTCTGGTAAGGTTACCTCTATTTTGTCCACA |
| | GACTTGTCCAGAATCGATTTGGCTATTGGTTTTCAACCATTCGCCATTACTTTTCCAGTTCCAG |
| | TTATAGTTTCTGTCGCCTTGTTGATCGTTAACATAGGTGTTTCAGCTTTGGTTGGTATTGCCAT |
| | TTTCTTGGTTGCTGTTGGTGGTATTGGTACTTCTGCTAAATGGTTGTTGAACATGAGAAGAG |
| | GTGCTAATCAGTACACTGATAAGCGTGTTGGTTTGATGAGAGAAATCCTGAACTCCATGAAG |
| | ATCATCAAGTTCTACTCTTGGGAAGATGCCTACGAAAAGAACGTTGTTGATCAGAGGAACAA |
| | AGAGATCTCCATCATCTTGAAGATGCAGACGATTAGGAATTTCTTGTTCGCTTTCGCTATTTC |
| | CTTGCCAACCGTTATTTCTATGGTTTCCTTTTTGGTCTTGTACGCCTTGTCTAACAAACAAAAT |
| | GCCGGTGATATCTTCTCCTCCTTGTCTTTGTTTGGTACTTTGTCCCAACAGGTTTTGATGTTGC |
| | CAATGGCTTTAGCTACTGGTGCTGATGCTTTTATTGGTATCACTAGAGTCAGAGAATACTTGC |
| | AGACTAAGGATTTGGAAGTCGAAGATGGTATTCCAGACAACTACAACAACGAAAACTTGGA |
| | CGAAAATCTGGCCTTGAAAGTTACTGATGCTTCTTACAAGTGGGAAAAGTTCGACGATATCG |
| | AAGATGAAGAAAAGCAACAACAAGAAGCTGCCGAAAACGAAGATGAGGATGATGATAACG |
| | AAACGAAGTTGGAGTCTAACAAGAACGAGTCCTCTATCTCTTCTGAGTTTTCTTCAAAGGACG |
| | AAAAGACTTCTACCAAGGCTGTTTTTGAAGGTTTCAACAACATCAACCTGGAAATCAAGAAG |
| | AATGAGTTCGTCATTATTACCGGTCCAATCGGTACTGGTAAATCCTCTTTGTTAACTGCCTTGT |
| | CCGGTTTTATGAAGCAAACCTCTGGTGAAATTGCCATCAATGGTTCTTTGTTGTTGTGTGGTC |
| | AACCATGGGTTCAAAACGCTACTTTCAAAGAGAACATCATCTTCGGTTCTCCATACGAAGAA |
| | GAAAGATACAACAAGGTTATTGAAGTCTGCGCCTTGAAGGATGATTTGAAAATTTTGCCAGG |
| | TGGTCACAACTCCGAAATTGGTGAAAGAGGTATTAACTTGTCTGGTGGTCAAAAGGCTAGAA |
| | TCAACTTAGCTAGAGCTGTTTACTCTGGTAAAGACACCATTTTGTTCGATGATGTTTTGTCCG |
| | CTGTTGATGCTAGAGTCGGTAAACATATTATCGATGAATGCTTCACCAAGTTCTTGGCTGATA |
| | AGACTAGAATTTTGGCTACCCACCAATTGTCCTTGATTGATAAGGCTGATAGAGTCATCTTCT |
| | TGAACGGTGATGGTACTATTAACATTGGTACTGTCCCAGAGTTGCTGTCCTCTAACAAAAATT |
| | TCGAAAAGTTGATGGACTTCGCCACCTCTTATAATGATCCAGACTTAGAGGATGAGGTCTTG |
| | ATCAAAGAAGATAACCAGTTGCAAAGGCAGCTGTCTAAGAAGTTCACTGAATCCAAAGAATT |
| | CGAGGACCCAGAAAATGAGAACGGTGTTTTGATAGCTGATGAAGAGAGAGCTAGAAACGCT |
| | ATTTCTTGGTCTGTTTACAAGCAGTTCTTGAAAGAAGGTCAAGGTATGTTTGGTGTTTTCGCT |
| | GTTCCATTGGCATTCTTGTTGATGGTTGGTGATGTTTTCTGCTCCATTTTCGTTAACGTTTGGT |
| | TGTCCTTCTGGATCTCTAAAAAGTTTCCAGGTAGATCCGATGGTTTCTACATTGGTATCTACG |
| | TGATGTTCACCTTCACCTCTGTTTTGATGATTTCCTGCGAATTCATGGTCATGGGTTACATTAC |
| | TACTACCGCCTCTAAGAAGCTAAACTTGAGAGCTATGGTTAGAGTCTTGCATACTCCAATGTC |
| | TTTCTTGGATACAACCCCAATTGGTAGGGTCTTGAATAGATTCTCTAAGGATACCGATGTCTT |
| | GGACAATGAGATAGGTGGTCAATTGAGAATGTTTACTCATCCAGCCGGTTTTGTTATCGGTG |
| | TCATTATTTTGAACATCGTCTACTTGCCTTGGTTTGCTTTGTCTATTCCACCATTGGCCATTTGC |
| | TTCGTGTGTATTACTAATTACTACCAGTCCTCCAGCAGAGAGATTAAGAGATTGGAAGCTGTT |
| | CAAAGGTCCTTCGTCTACAACAATTTTAACGAAGTGTTGTCCGGTATGAACACCATTAAGGCT |
| | TACAAATCCAACAACAGGTTCATCGTTAAGAACGACTACTTGATCGACAGAATGAACGAAGC |
| | TTACTACATCACCATTGCCAATCAAAGATGGATCTCCTTGCATTTGGATTTGGTTGCTTGTGCT |
| | TTGGCTTTGGTCATTACAATTTTGTCTGCCACTAGACAGTTCGATATTAACGCTGCTTCTGTCG |
| | GTTTGATTACTACCTACACTTTACAATTGGCCGGCTTGATGTCTTTGATTTTGAGAGCTTACAC |
| | CCAGATCGAGAACGAAATGAATTCTGTTGAAAGATTGTGCCACTACGCTAATGATTTGGCTC |
| | AAGAAAACCAGTACAGAAACGAAGAAACAAAGCCACAAGGTCAATGGCCAACTCAAGGTGC |
| | TATTGAGTTTAATCAAGTCTCCTTGAGATACAGAGATGGTTTGCCTTTGGTTCTGAAGAACTT |
| | GTCCATCAATATTGGTGGTGGTGAAAAAGTTGGTATTTGTGGTAGAACAGGTGCCGGTAAA |
| | TCTTCTATTATGGTTGCCTTGTACCGTCTGAACGAATTGTCTCAAGGTACTATCAAAATCGAT |
| | GGTGTCGATGTTTCTAAGTTGGGTTTGTTTGACTTGAGGTCCAAGTTGTCCATTATTCCACAA |
| | GATCCAGCTTTGTTCCAAGGCTCTATTAGAAAGAATTTGGACCCATTCGATGAACACGAGGA |
| | TTCAATTTTGTGGGATGCTTTGAGAAGATCCGGTTTGATAGAACCAGAAGAATTGTCCTCTG |
| | CCATTAACAACTCTGATAAGTCTACCTTCCATAAGTTCCACTTGGATCAATTGGTTGAGGATG |
| | AAGGTGCTAACTTTTCATTGGGTGAAAGACAATTGATTGCTTTGGCAAGAGCTTTAGTTAGA |
| | GACTGCAAGATTTTGATCTTGGATGAAGCTACCTCCTCCGTTGATTACGAAACTGATTCTAAG |
| | ATCCAAAACACCATCAAGAACGAATTCAAGGATTGCACCATCTTGTGCATTGCCCATAGATTG |
| | AAAACTATCTTGAACTACGACAAGATCCTGGTCTTGGAAAAAGGTGAAATCGAACAATTTGA |
| | CGAGCCCATTAAGTTGTTCCACGATGAATTAGGTATCTTCAAGCAGATGTGCGAAAAGTCCG |
| | ATATTACCATTGCTGACTTCGAGTGA |
| SEQ ID | MTSKETSMGLQVDDDSPLPELERRLMTPFLSKTVPPIPKENERLPYQLNHANFISKIFFWWLNPI |
| NO: 928 | MNVGYKRTLTPNDLYYVENDLTAKQNYDDFMINLNKVLSKAKLKAKLKNPELTDDELDELPYPKF |
| | SLVIALLMTFKYKYSKAVFFKLLSDISQVLNPLLTKALINFVEKKTYLPDTPVGKGIGYAIGVSAMLV |
| | ANGIFLNHFLHNSMNVGAQSKSILTTALLKKSFKATPKTKHTYTSGKVTSILSTDLSRIDLAIGFQPF |
| | AITFPVPVIVSVALLIVNIGVSALVGIAIFLVAVGGIGTSAKWLLNMRRGANQYTDKRVGLMREIL |
| | NSMKIIKFYSWEDAYEKNVVDQRNKEISIILKMQTIRNFLFAFAISLPTVISMVSFLVLYALSNKQN |
| | AGDIFSSLSLFGTLSQQVLMLPMALATGADAFIGITRVREYLQTKDLEVEDGIPDNYNNENLDENL |
| | ALKVTDASYKWEKFDDIEDEEKQQQEAAENEDEDDDNETKLESNKNESSISSEFSSKDEKTSTKA |
| | VFEGFNNINLEIKKNEFVIITGPIGTGKSSLLTALSGFMKQTSGEIAINGSLLLCGQPWVQNATFKE |
| | NIIFGSPYEEERYNKVIEVCALKDDLKILPGGHNSEIGERGINLSGGQKARINLARAVYSGKDTILFD |
| | DVLSAVDARVGKHIIDECFTKFLADKTRILATHQLSLIDKADRVIFLNGDGTINIGTVPELLSSNKNF |
| | EKLMDFATSYNDPDLEDEVLIKEDNQLQRQLSKKFTESKEFEDPENENGVLIADEERARNAISWS |
| | VYKQFLKEGQGMFGVFAVPLAFLLMVGDVFCSIFVNVWLSFWISKKFPGRSDGFYIGIYVMFTFT |
| | SVLMISCEFMVMGYITTTASKKLNLRAMVRVLHTPMSFLDTTPIGRVLNRFSKDTDVLDNEIGGQ |
| | LRMFTHPAGFVIGVIILNIVYLPWFALSIPPLAICFVCITNYYQSSSREIKRLEAVQRSFVYNNFNEVL |
| | SGMNTIKAYKSNNRFIVKNDYLIDRMNEAYYITIANQRWISLHLDLVACALALVITILSATRQFDIN |
| | AASVGLITTYTLQLAGLMSLILRAYTQIENEMNSVERLCHYANDLAQENQYRNEETKPQGQWPT |
| | QGAIEFNQVSLRYRDGLPLVLKNLSINIGGGEKVGICGRTGAGKSSIMVALYRLNELSQGTIKIDGV |
| | DVSKLGLFDLRSKLSIIPQDPALFQGSIRKNLDPFDEHEDSILWDALRRSGLIEPEELSSAINNSDKST |
| | FHKFHLDQLVEDEGANFSLGERQLIALARALVRDCKILILDEATSSVDYETDSKIQNTIKNEFKDCTI |
| | LCIAHRLKTILNYDKILVLEKGEIEQFDEPIKLFHDELGIFKQMCEKSDITIADFE |
| SEQ ID | ATGGCCGAAGATTTGGGTTTGTCCTCTCCAAAAACTGATCCAGAAGATTCCTCTAAGTTGGTC |
| NO: 929 | TTGGAGAGAAGAATTATGACCCCATTCTTGTCTAAAAAGGTTCCACCAGTTCCAACTGAAGCT |
| | GAAAGAAAGTATTTCCCCAAGAACAAGAACCCCTTGTCCTTGATTTTCTACTGGTGGTTGAAT |
| | CCAATCATGAAGGTTGGTTACAAGAGAACTTTGACTCCAAACGACTTGTACAAATTGACCCC |
| | AGAAATGAAGATCGATCACACCTATGATAAGTTCGAGAAGATCCTGATGAAGATTGTCGAA |
| | AAGGATAGAGCTAAAGCCTTGGCTGAAGATCCATCTTTGACTGAAGAAGATTTGATCAGAA |
| | GGCCCTATCCAAAGTATGCTTTGCCAAAAGCTTTGTTCTTGACCTTCAAGTGGAAGTACATTT |
| | TGGCCTTGTTCTTCAAGGTTTTGGCTGATGTTTGTGGTGTCTGTAATCCTTTGTTGTCCAAGA |
| | AGTTGATTGCCTTCGTTGAGAGAAAAACCTCTGATCCATCATTGGCTGTTAACGATGGTATTG |
| | GTTATGCTTTGGGTTGTACCTTCTTGGTTTTGTTCTCTGGCATCATGATTAACCAGTCCTTGTT |
| | GCATTCTTTGACTACTGGTGCTCATTGCAAGGGTATTTTAACTACTGCTTTGCTGCGTAAGTCT |
| | TTCAAAGCTGATGCTGAAACTAGACACAAGTACACCTCTGGTAGAATTACCTCTATTATGTCT |
| | ACCGATTTGGCCAGAATTGATTTGGCTATTGGTTTTCAACCATTCGGCTTGACTTTTCCAATTC |
| | CAGTTATTATTGCCATAGCCTTGTTGATCGTTAATATCGGTGTTTCTTCTTTGGCTGGTATTGC |
| | CGTTTTCATCATTTCCATAGTTGCTATTGGTGGTTCCGCTAGATTCCTAATGAAGATGAGAAG |
| | AGGTGCTAACAAGTATACCGACAAGAGAATCTCTTTGATGAGGGAAATCTTGCAGTCCATGA |
| | AGATGATCAAGTACTACTCTTGGGAAGATGCCTACGAAAAGTCCGTTATTCAGCAAAGAACA |
| | AAAGAGGTCGGTATCATCTTGAAGATGCAGTCTATTAGAAACGGTTTGTTGGCTTTCTCTATT |
| | GCCTTGCCAGCTTTCACTTCTATGATTGCATTTTTGGTCTTGTACGGCGTGTCCTCTAACAAAA |
| | ATCCAGCTAACATTTTCCCCAGCGTTTCTTTGTTTGGTACTTTGGCTCAACAAACCATGATGTT |
| | GCCAATGGCTTTGGCTACAGGTGCTGATGCTATGATTGGTTTGGGTAGAGTTAGAGAATTCT |
| | TGGAATCTGGTGTTGATTTGAAGGACCCTGAAGAATTTGATGGTCATGCTCCAGAAACAGAC |
| | GAAGAGGTAAAAGAATTGCCATCCGATGTTGCTATCGAAGCTAAAGATGCTACTTTCATCTG |
| | GGAAAAGTTCGCTGAAGTTGACTCTGAAGAAACTTCTGATGCTTCCAAGTCTGACAAAGAGA |
| | CTTCTTCTACTTTGTCCGAAGGTGAGTTGAAAAAGACCTTGTCATCTGAAGAGGAAGAAGGT |
| | AACGAACAGTACACTAACTCTGTTTTCGAAGGTTTCCACAACATCAACTTGGAGATTAAGAA |
| | GAACGAGTTCATCATTGTCACTGGTGCAATTGGTTCTGGTAAGTCATCTTTGTTGACTGCTTT |
| | AGCTGGTTTCATGAAGAGAACTACTGGTTCTTTGTCTGTTGGTGGTAGTGTTTTGTTGTGTGG |
| | TACTCCATGGGTTCAAAATGCTACTGTTAGAGAAAACATTACCTTCGGTTTGGAATACGACG |
| | AAGAAAGATACGAAAGGGTTTTAGATGCTTGCGCTTTGAGAGATGACTTGAAGTTGTTTACA |
| | GGTGGTGATTTGACCGAAATTGGTGAAAGAGGTATTACATTGTCTGGTGGTCAAAAGGCTA |
| | GAATCAATTTGGCTAGAGCTGTTTATGCCGACAAAGAAATCGTTTTGTTCGATGATGTTTTGT |
| | CCGCTGTTGATGCTAGAGTTGGTAAACATATAGTTGATGATTGCCTGTGCGATTTCATGGGT |
| | CATAAGACTAGAATTTTGGCTACCCACCAATTGTCTTTGATTGATAAGGCTGATAGGGTCATC |
| | TTCTTGAATGGTGATGGTACTATTCACATCGGTACAGTTAATGAGTTGTTGCAGTCTAATGAA |
| | GGCTTCGTCAAACTGATGGAATTCTCCAAGAAATCCGAAGAGGACGAAAAGAATGAAGAAG |
| | AAGAAGAGGAAGCTGACGTCTTGAAATTGCAAAAGTCTCAATCTATTGCCGCCTCTCAAAAC |
| | AATGATGCTGTTGCTGGTATTTTGGTTGGTGAGGAAGAAAAAGCTAAGAACGGTATTTCCTT |
| | CTCCGTTTACACCAACTACTTGAAAGAAGGTGGCGGTATTTTTGGTAAATTTGCTGGTCCATT |
| | GACCTTGTTGTTTTTGACTTTCGATGTGTTCACCTCCATTTTCATCAACGTTTGGTTGACTTTCT |
| | GGATAACCGATAAGTGGTCTTATAGATCCCAAGGTTTCTACATCGGTATCTACGTTATGCTGG |
| | TTTTGATGAACATCGTCGTTATTGCTTGCTGCTTGATTTTGATGGGTTACATTTCTACTACCTC |
| | CGCCAAGTCTTTGAATTTGAAAGCTATGAAGAGGATCCTGCACTCTCCAATGTCTTTTATGGA |
| | TGTTACTCCAATGGGCAGAATCTTGAACAGATTCACTAAGGATACTGACGTGTTGGATAACG |
| | AAATCGGTGAACAAGTTAGAATGTTCTTGCATCCAGCAGGTTTCGTTGTTGGTGTTGTTATTT |
| | TGTGCATCATCTACTTGCCATGGTTCGCTTTGGTTATTCCACCTGTTGTTATCGTTTCAACTTT |
| | GACCGCTAGTTTCTACCAAGCTTCTTCTAGAGAAATCAAGAGATTGGAAGCCGTTCAAAGGT |
| | CTTTCGTCTACAACAATTTCAACGAGATCTTGAACGGTATGACTACCTTGAAAGCTTACAGAT |
| | CTACCTCTAGATTCTTGGCCAAAAACGAAGTTTTCGTCGACTCTATGAATGAGGCTTACTTCA |
| | TCGTTATCGCTAACCAGAGATGGATTTCCATTCACATGGATTTGGTTGCTGTTTGCTTGTTGG |
| | CAGTTGTTTCTTTATTGACTGTTACCAGGCAGTTCAACATTTCTGCTGCTTCTACCGGTTTGGT |
| | TGTTACTAATGTTTTACAGATCGGTGGCCTGATGTCATTGATTATGAGAGCTTATACCACCGT |
| | CGAAAACGAAATGAATTCTGTCGAAAGGTTGTACCAATACGCCAACACTTTGGTTCAAGAAA |
| | AGCCATACAGAGTGAACGAAACTGTTCCAGCTCCATCATGGCCAGAAACTGGTTCTATTAAG |
| | TTCGAAAATGTCTCCCTGAGATACAGAGAAGGTTTGCCTATGGTTCTGAAGAACTTGTCTAT |
| | GTCTGTTAAGGGCTCTGAAAAGATTGGTATTTGTGGTAGAACTGGTGCCGGTAAATCTTCTA |
| | TTATGACTGCCTTGTACAGGTTGTCTGAATTAGCTGAAGGTGCCATCTTGATTGATGATGTTG |
| | ACATCTCTAAACTGGGCATGTTCGAATTGAGATCCAAGTTGTCTATTATCCCACAAGATCCAG |
| | TTTTGTTCCAAGGCTCCATTAGAAAGAATTTGGATCCATTCGGTGAATCCGATGATGAACACT |
| | TATGGGATGCTTTGAGAAGATCTGGTTTGACCGATGCTTCTATCTTGACTACTATTAAGGCCC |
| | AAACTAAGGATGATCCAAACTTCCATAAGTTCCACTTGGATCAAATCGTCGAAGATGAAGGT |
| | TCTAACTTCTCATTGGGTGAAAGACAACTATTGGCTTTAGCAAGAGCCTTGGTCAGAAATTCC |
| | AGAATTTTGATTTTGGACGAAGCCACTTCCTCCGTTGATTACGAAACTGATGCTAAGATCCAA |
| | AACACCATTACCAACGAGTTTTCCAACTGTACCATTTTGTGTATCGCCCACAGACTGAAAACC |
| | ATCTTGAACTATGATAGGATCCTGGTGTTGGAACAAGGTGAAATTGAAGAATTCGATACCCC |
| | AATCAGGTTGTACGAAAATGATGGTATCTTCAAGCAGATGTGCGAAAGATCTGATATCACCA |
| | GAGAAGATTTTCACATCCAGAAGTAA |
| SEQ ID | MAEDLGLSSPKTDPEDSSKLVLERRIMTPFLSKKVPPVPTEAERKYFPKNKNPLSLIFYWWLNPIM |
| NO: 930 | KVGYKRTLTPNDLYKLTPEMKIDHTYDKFEKILMKIVEKDRAKALAEDPSLTEEDLIRRPYPKYALPK |
| | ALFLTFKWKYILALFFKVLADVCGVCNPLLSKKLIAFVERKTSDPSLAVNDGIGYALGCTFLVLFSGI |
| | MINQSLLHSLTTGAHCKGILTTALLRKSFKADAETRHKYTSGRITSIMSTDLARIDLAIGFQPFGLTF |
| | PIPVIIAIALLIVNIGVSSLAGIAVFIISIVAIGGSARFLMKMRRGANKYTDKRISLMREILQSMKMIK |
| | YYSWEDAYEKSVIQQRTKEVGIILKMQSIRNGLLAFSIALPAFTSMIAFLVLYGVSSNKNPANIFPS |
| | VSLFGTLAQQTMMLPMALATGADAMIGLGRVREFLESGVDLKDPEEFDGHAPETDEEVKELPS |
| | DVAIEAKDATFIWEKFAEVDSEETSDASKSDKETSSTLSEGELKKTLSSEEEEGNEQYTNSVFEGFH |
| | NINLEIKKNEFIIVTGAIGSGKSSLLTALAGFMKRTTGSLSVGGSVLLCGTPWVQNATVRENITFGL |
| | EYDEERYERVLDACALRDDLKLFTGGDLTEIGERGITLSGGQKARINLARAVYADKEIVLFDDVLSA |
| | VDARVGKHIVDDCLCDFMGHKTRILATHQLSLIDKADRVIFLNGDGTIHIGTVNELLQSNEGFVKL |
| | MEFSKKSEEDEKNEEEEEEADVLKLQKSQSIAASQNNDAVAGILVGEEEKAKNGISFSVYTNYLKE |
| | GGGIFGKFAGPLTLLFLTFDVFTSIFINVWLTFWITDKWSYRSQGFYIGIYVMLVLMNIVVIACCLIL |
| | MGYISTTSAKSLNLKAMKRILHSPMSFMDVTPMGRILNRFTKDTDVLDNEIGEQVRMFLHPAGF |
| | VVGVVILCIIYLPWFALVIPPVVIVSTLTASFYQASSREIKRLEAVQRSFVYNNFNEILNGMTTLKAY |
| | RSTSRFLAKNEVFVDSMNEAYFIVIANQRWISIHMDLVAVCLLAVVSLLTVTRQFNISAASTGLVV |
| | TNVLQIGGLMSLIMRAYTTVENEMNSVERLYQYANTLVQEKPYRVNETVPAPSWPETGSIKFEN |
| | VSLRYREGLPMVLKNLSMSVKGSEKIGICGRTGAGKSSIMTALYRLSELAEGAILIDDVDISKLGMF |
| | ELRSKLSIIPQDPVLFQGSIRKNLDPFGESDDEHLWDALRRSGLTDASILTTIKAQTKDDPNFHKFH |
| | LDQIVEDEGSNFSLGERQLLALARALVRNSRILILDEATSSVDYETDAKIQNTITNEFSNCTILCIAHR |
| | LKTILNYDRILVLEQGELEEFDTPIRLYENDGIFKQMCERSDITREDFHIQK |
| SEQ ID | ATGTCCGTTGAAGAAACCGCTGGTACTAATTTGGCTCTACAAAAGAGATCTTTGACCTTCTTG |
| NO: 931 | TTCGGTAAAAAGGTTCCACCATTGCCATTGGAAGAAGAGAGAAAAGTTTTTCCACATTACCA |
| | CACCAACATCATCTACAGAGCTTTCTTTTGGTACTTGACCCCATTGATGAGAGTTGGTTACAA |
| | AAGAACATTGCAACCAGAGGACATGTACTTGTTGGATGAAGAACAAACCATCGACTACATGT |
| | ACAAGAAGTTCATTGCCTCCGTTGATTCCGATTTGGAAAAGCAAAAGGCTAAGCACATTCTG |
| | AAAAAGTGCAAAGAAAGAGGTGAAACCCCAGAATCTTCTTCAGTTGATCCAGAAACTGACTT |
| | GGAAGATTTCGAATTGCACTACGTTTACTTGGTCAAGGGTTTGATTAGAGTTTTCGGTTGGC |
| | AATATGGTTGGGCTACTTTCATTAAGGCTTTCGCTGATTTGTCATCTGCTTTGTTGCCTTTGGT |
| | TTTGAAGCGTTTGATCAACTTCGTTGAAAGAAAGGCTTATGGTTTGGAACCACATGTTGGTA |
| | AAGGTATTGGTTACGCTTTTGGTGTTTCCTTGATGGTTTACTTTTCTGGTTTTGCCTTCAACCA |
| | CTTCTTCTACAACTCTACTACTGTTGGTGCTAAGGTTAAGGCTGTTTTGACAAAAGCTTTGTTG |
| | GAGAAGTCTTTCACCTTGGATGCTAGAGGTAAACATAAGTTCCCAATCGGTAAGATCAACTC |
| | CATTATGGGTACTGATTTGACCAGAGTTGATTTGGCTTTGGGTTTCTTTCCATTCTTGTTGGGT |
| | TTTCCCATTCCATTGATCGTTATCATCGTTATGTTGTTGGTTAACATCGGTGTTTCTGCTTTGG |
| | CTGGTATTGGTGTTTTTGTGATGTCTATTTTCTTGACCGGTTTCATCGTTAGAGAGTTGTTCAG |
| | ATTGAGAGTTATCGCTAACGTTTTCACCGACGAAAGAGTCAATTTGGTCAAAGAGCTGTTGA |
| | AGAACTTCAAGATGATCAAGATGTACGGTTGGGAGAACTCCTACTTCAAAGAATTCATGGAC |
| | ATCAGGCAGAAAGAAATGACTACCGTTTTGAGAATGCAAGTTGCCAGAAACGTTTTGATTGC |
| | TGTTGCTATTTGGCTGCCAATCGTTTCTTCTATGGTTGCATTTTTGGTCTTGCACAAGATCGAT |
| | TCTAACAGAACAGTTGGTGACATCTTCTCCTCATTGTCTTTGTTCCAAGAATTGACCACTCAGT |
| | TTTTGATGGTTCCAGCTGCTTTAGCTATGTCTACCGATATGGTTATTGCTTTCAAGAGGATCTC |
| | TCAGTTGTTGTCTTGTCCAGATGGTCAAGAATTGGCTACCTTTTTCGATACTTTGGATGATCCT |
| | AAATTGGCCCTGCAATTGAAGAATGCTTCTTTTCAATGGTTCACCTTCGAAGATGAGAAGCCA |
| | GAAGATTCCAAATCTGAAGATGAACCAGAATCCTCCGATCAGAAATCTGAAAAATCTGCTGG |
| | TTCCGAAGTTGTCAAGACTGAATTTCCAGGTTTGCTGAACTTGAACTTGTCTATTGCTAAGGG |
| | TGAATTCGTTGTTGTTACCGGTTCTATTGGTTCCGGTAAATCTTCTTTGTTGAACGCTTTTTCC |
| | GGCTTTATGCCAAAAACTTCTGGTTCTGTTGCTAAGAACGGTTCTTTGATGTTATGTGGTTAT |
| | CCATGGGTTCAAAACGCTACCATCAAAGAAAACATCGTGTTCGGTGAAGAATACGACCAAG |
| | AAAAGTACGATACCATCGTTAAGGTCTGTTCTTTGACTGGTGATTTCGAACAATTTTCCGCTG |
| | CTGATAAGACTGAAGTTGGTGAAAGAGGTATTACATTGTCTGGTGGTCAAAAGGCCAGAAT |
| | CAATTTGGCTAGAGCAGTTTATTCCGACAAGGACATCATCTTGTTAGATGACGTTTTGTCAGC |
| | TGTTGATGCCAAGGTTGGTAAATCTATTATGAAGGATTGCATCATGGGCTACCTGAAAAACA |
| | AGACTAGAGTTTTGGCTACCCATCAGTTGTCCTTGATTGATTCAGCAGATAAGATCATGTTCT |
| | TGAACGGTGATGGTACTGTTGATTACGGTACTTTGGACGAAGTTAAGTCTAGAAACCCAGAA |
| | TTCGTCAGGTTGATGGAATTCTCTCATAACGTTGATGATGATGACGAGGACGAAAATGAACC |
| | TGAACAAGAAAAGAATGATGATTTCGGTGCTGATGACGATGAAGATGGTAGATTGATCAGA |
| | GCTGAAGAAAAGGCTGTTAACGCTATTTCTTGGGATGTTTACAGAACCTACATCAAAGCTGG |
| | TTCTGGTAAGTTGGGTTACTTTTACCCAGTTGTAGTTGTTTTGGCCTTCTCTGTTTCTACCTTCT |
| | GTTTGTTGTTTGTCAACAACTGGTTGTCCTTTTGGGAATCCGGTAAGTTTCATGAACCAGGTT |
| | CTTTTTACGAGGGCATCTATATTATGTTCGGCTTCTTGTGCCTGATCTTCTTGATCGTTGAATT |
| | CTTGTTCTTGGTCTACTTCTGTAACATGGCTGCTAGAAGATTCAACATCTTGGCTTTTAAGAG |
| | GTTGTTGCATACCCCAATGTCTTTCTTGGATACAACTCCAATGGGTAGAGTCTTGAACAGATT |
| | CACTAAGGATACTGATGCTATGGACAACGAAATCCAAGACCAATTCAGACAATTCTTCCAAC |
| | CATTGGCTACTATCGTTGGTACTTTGATCTTGTGTATCATCTACTTGCCATGGTTCGCTATTGC |
| | TATTCCAATTGTCTACGCTCTGTTCTACTTGATCTCTAACTTTTACTTGGCCTCCTCCAGAGAA |
| | ATCAAAAGATTGGAAGCTTTGAAGAGGTCCTTCGTTTACTCCCATTTTAACGAATCTTTGTCC |
| | GGTATGGACACTATTAAGGCTCATAACTCTGAAACCAGATTCTTGAACACTAACGCCCACTTG |
| | ATTAACGACATGAATGAATCTTACTACACCTTCATTGCCGTCCAAAGATGGTTGGCTTCTAAC |
| | TTGGAATTATTGGCTTCTTTGGTCTGCTTGCTGATTTGCTTGTTGTGCGTTTTTAGGGTGTTCA |
| | ACATTTCTGGTGCTTACACCGGTTTGGTGTTGACTTACGTTGTTAATATTGTCGGCTTGGTGT |
| | CCTTCATGTTGAGATCTATGACCGAAGTCGAAAACCAGATGAACTCTGTTGAAAGGTTGAAG |
| | TTTTACGCCATCGACTTGCAACAAGAAGCTGCTTACGATATTCCAGAAAGAGATCCTGAACCT |
| | ACTTGGCCAGCTTCTGGTAGTATTTCATTTCAAGATGTCTCCATGAGATACCGTGAAGGTTTG |
| | CCATATGCTGTTAAGGGTTTGTCTTTGGATGTTGCTGGTTCAGAAAAGATCGGTATTTGTGGT |
| | AGAACTGGTGCTGGTAAATCCTCTGTTATGTACTCCTTGTTTAGATTGGCTGAATTCGAGGGT |
| | AAGATTACCATTGATGGTGTCGATATTTCCCAAATCGGTCTGCATAAGTTGAGGACCAAGAT |
| | TTCCATTATTCCACAAGATCCAGTGTTGTTCTCTGGTAATGTCAGATCTAATTTGGACCCATTC |
| | AACGACAGAACCGATGAAGAATTATGGTCTGCATTGGAAAAAGCCGGTTTGATCGATGGTT |
| | CTATTTTGGAACAAGTCAAAAAGCAGCAAAAGACCGATGCTAACTTGCACAAATTCCACTTG |
| | GATAGAGTCGTTGAAGATGACGGTTCTAATTTCTCATTGGGAGAAAGACAATTGCTGGCTTT |
| | GGCAAGAGCTTTGGTTAGAGGTGCTAGAATATTGGTTTTAGATGAAGCCACCTCTTCCGTTG |
| | ACTACGAAACAGATGCTAAAGTTCAAAAGACCATTACCGAAGAATTCGCTCAATGTACTGTT |
| | TTGTGCATTGCCCATAGATTGAAAACCATCGTCAAGTACGACAGGATCTTGGTTTTGGACAA |
| | AGGTGAAATTGCCGAATTGGATACTCCAAGAAACTTGTACGAACAGAACGGTATTTTCAGAT |
| | CCATGTGTGATAAGTCCGGTATCGTGGAAGATGATTTCTGA |
| SEQ ID | MSVEETAGTNLALQKRSLTFLFGKKVPPLPLEEERKVFPHYHTNIIYRAFFWYLTPLMRVGYKRTL |
| NO: 932 | QPEDMYLLDEEQTIDYMYKKFIASVDSDLEKQKAKHILKKCKERGETPESSSVDPETDLEDFELHY |
| | VYLVKGLIRVFGWQYGWATFIKAFADLSSALLPLVLKRLINFVERKAYGLEPHVGKGIGYAFGVSL |
| | MVYFSGFAFNHFFYNSTTVGAKVKAVLTKALLEKSFTLDARGKHKFPIGKINSIMGTDLTRVDLAL |
| | GFFPFLLGFPIPLIVIIVMLLVNIGVSALAGIGVFVMSIFLTGFIVRELFRLRVIANVFTDERVNLVKEL |
| | ŁKNFKMIKMYGWENSYFKEFMDIRQKEMTTVLRMQVARNVLIAVAIWLPIVSSMVAFLVLHKID |
| | SNRTVGDIFSSLSLFQELTTQFLMVPAALAMSTDMVIAFKRISQLLSCPDGQELATFFDTLDDPKL |
| | ALQLKNASFQWFTFEDEKPEDSKSEDEPESSDQKSEKSAGSEVVKTEFPGLLNLNLSIAKGEFVVV |
| | TGSIGSGKSSLLNAFSGFMPKTSGSVAKNGSLMLCGYPWVQNATIKENIVFGEEYDQEKYDTIVK |
| | VCSLTGDFEQFSAADKTEVGERGITLSGGQKARINLARAVYSDKDIILLDDVLSAVDAKVGKSIMK |
| | DCIMGYLKNKTRVLATHQLSLIDSADKIMFLNGDGTVDYGTLDEVKSRNPEFVRLMEFSHNVDD |
| | DDEDENEPEQEKNDDFGADDDEDGRLIRAEEKAVNAISWDVYRTYIKAGSGKLGYFYPVVVVLA |
| | FSVSTFCLLFVNNWLSFWESGKFHEPGSFYEGIYIMFGFLCLIFLIVEFLFLVYFCNMAARRFNILAF |
| | KRLLHTPMSFLDTTPMGRVLNRFTKDTDAMDNEIQDQFRQFFQPLATIVGTLILCIIYLPWFAIAI |
| | PIVYALFYLISNFYLASSREIKRLEALKRSFVYSHFNESLSGMDTIKAHNSETRFLNTNAHLINDMNE |
| | SYYTFIAVQRWLASNLELLASLVCLLICLLCVFRVFNISGAYTGLVLTYVVNIVGLVSFMLRSMTEVE |
| | NQMNSVERLKFYAIDLQQEAAYDIPERDPEPTWPASGSISFQDVSMRYREGLPYAVKGLSLDVA |
| | GSEKIGICGRTGAGKSSVMYSLFRLAEFEGKITIDGVDISQIGLHKLRTKISIIPQDPVLFSGNVRSNL |
| | DPFNDRTDEELWSALEKAGLIDGSILEQVKKQQKTDANLHKFHLDRVVEDDGSNFSLGERQLLAL |
| | ARALVRGARILVLDEATSSVDYETDAKVQKTITEEFAQCTVLCIAHRLKTIVKYDRILVLDKGEIAEL |
| | DTPRNLYEQNGIFRSMCDKSGIVEDDF |
| SEQ ID | ATGACCTCTCCAGGTTCTGAAAAGTGTACTCCAAGATCTGATGAAGATTTGGAAAGATCCGA |
| NO: 933 | ACCACAATTGCAAAGAAGATTATTGACCCCATTCCTGTTGTCTAAAAAGGTTCCACCAATTCC |
| | AAAAGAGGACGAGAGAAAACCATATCCATACCTGAAAACTAACCCCTTGTCTCAAATTTTGT |
| | TCTGGTGGTTGAATCCCTTGTTGAGAGTTGGTTACAAGAGAACTTTGGACCCAAACGATTTCT |
| | ACTACTTGGAACACTCCCAAGATATTGAAACCACCTACTCTAACTACGAAATGCACTTGGCTA |
| | GAATCTTGGAAAAGGATAGAGCTAAAGCTAGAGCTAAGGATCCAACTTTGACAGACGAAGA |
| | TTTGAAGAACAGAGAGTATCCAAAGAACGCTGTTATTAAGGCTTTGTTCTTGACCTTCAAGT |
| | GGAAGTATTTGTGGTCCATCTTCCTGAAGTTGTTGTCCGATATAGTTTTGGTCTTGAACCCCTT |
| | ATTGTCCAAGGCTTTGATTAACTTCGTTGACGAGAAGATGTACAACCCAGATATGTCTGTTG |
| | GTAGAGGTGTTGGTTATGCTATTGGTGTTACTTTCATGTTGGGTACATCCGGTATTTTGATCA |
| | ACCACTTCTTGTACTTGTCTTTGACTGTTGGTGCTCATTGCAAAGCTGTTTTGACTACTGCTAT |
| | CATGAACAAGTCTTTCAGAGCTTCCGCTAAATCTAAACACGAATATCCTTCAGGTAGAGTCAC |
| | CTCTTTGATGTCTACTGATTTGGCCAGAATTGATTTGGCTATTGGTTTTCAACCATTCGCCATT |
| | ACTGTTCCAGTTCCAATTGGTGTTGCTATTGCTTTGTTGATCGTTAACATTGGTGTTTCTGCTT |
| | TGGCTGGTATTGCTGTTTTCTTGGTCTGTATCGTTGTTATCTCTGCCTCTTCTAAGTCCTTGTTG |
| | AAAATGAGAAAAGGTGCTAACCAGTACACCGATGCTAGAATTTCTTACATGAGAGAAATCCT |
| | GCAGAACATGAGGATCATCAAGTTTTACTCTTGGGAAGATGCCTACGAAAAGTCTGTTGTTA |
| | CTGAAAGAAACTCCGAGATGTCCATCATCTTGAAGATGCAATCTATCCGTAACTTCTTGTTGG |
| | CCTTGTCTTTATCTTTGCCAGCCATTATTTCTATGGTTGCCTTCTTAGTCTTGTACGGTGTTTCT |
| | AATGATAAGAACCCAGGCAACATCTTCAGCTCCATTTCTTTGTTTTCAGTCTTGGCTCAACAG |
| | ACCATGATGTTGCCAATGGCTTTGGCTACTGGTGCTGATGCTAAAATTGGTCTAGAAAGATT |
| | GAGACAGTACTTGCAATCCGGTGACATCGAAAAAGAATACGAAGATCACGAAAAGCCAGGT |
| | GATAGAGATGTTGTTTTGCCAGATAATGTTGCCGTCGAATTGAACAACGCTTCTTTCATTTGG |
| | GAAAAGTTCGATGATGCCGATGATAACGATGGTAACTCTGAAAAGACCAAAGAAGTTGTCG |
| | TTACCTCCAAGTCATCATTGACTGATTCTTCCCATATCGATAAGTCTACCGATTCTGCTGATGG |
| | TGAGTACATTAAGTCTGTTTTCGAAGGCTTCAACAACATCAACTTGACCATTAAGAAGGGTG |
| | AGTTCGTTATTATCACTGGTCCTATTGGTTCCGGTAAGTCATCTTTGTTGGTTGCTTTAGCTGG |
| | CTTTATGAAGAAAACCTCTGGTACTTTGGGTGTCAATGGTACTATGTTGTTGTGTGGTCAACC |
| | ATGGGTTCAAAACTGTACTGTTAGAGACAACATCTTGTTCGGTTTGGAATACGATGAAGCCA |
| | GATACGATAGAGTTGTAGAAGTTTGTGCTTTGGGTGACGACTTGAAAATGTTTACTGCTGGT |
| | GATCAAACCGAAATCGGTGAAAGAGGTATTACTTTATCTGGTGGTCAAAAGGCCAGAATCA |
| | ACTTGGCAAGAGCTGTTTATGCTAACAAGGACATTATCTTGTTGGACGATGTTTTGTCTGCTG |
| | TTGATGCTAGAGTTGGTAAATTGATCGTTGATGATTGCCTGACTTCTTTCTTGGGTGACAAAA |
| | CTAGAATTTTGGCTACCCACCAACTGTCCTTGATTGAAGCTGCTGATAGAGTTATCTACTTGA |
| | ACGGTGATGGTACAATCCATATCGGTACTGTCCAAGAACTGTTGGAATCTAATGAAGGCTTC |
| | TTGAAGCTGATGGAATTCTCCAGAAAATCCGAATCCGAAGATGAAGAAGATGTCGAAGCTG |
| | CTAACGAAAAGGATGTCTCTTTACAAAAGGCCGTTTCTGTTGTGCAAGAACAAGACGCTCAT |
| | GCTGGTGTTTTGATTGGTCAAGAGGAAAGAGCAGTTAACGGTATTGAATGGGACATATACA |
| | AAGAGTACCTACACGAAGGTAGAGGTAAGTTGGGTATTTTTGCTATTCCAACCATCATCATG |
| | TTGTTGGTCTTGGATGTTTTCACGTCCATTTTCGTTAACGTCTGGTTGTCTTTTTGGATCTCCC |
| | ATAAGTTTAAGGCTAGATCCGATGGTTTTTACATCGGCTTGTACGTTATGTTCGTTATCTTGTC |
| | CGTTATTTGGATTACCGCCGAATTTGTTGTTATGGGCTACTTTTCATCTACCGCTGCTAGAAG |
| | ATTGAACTTGAAAGCTATGAAGAGAGTCTTGCATACCCCAATGCATTTCTTAGATGTTACTCC |
| | AATGGGCAGAATCTTGAACAGATTCACTAAGGATACTGACGTCTTGGACAACGAAATTGGTG |
| | AACAAGCCAGAATGTTTTTACACCCAGCTGCTTATGTTATCGGTGTCTTGATTTTGTGCATCAT |
| | CTACATTCCATGGTTCGCTATTGCAATTCCACCATTGGCTATTTTGTTCACCTTCATCACCAACT |
| | TCTATATCGCCTCTTCAAGAGAAGTCAAGAGAATTGAAGCCATCCAAAGGTCTTTGGTGTAC |
| | AACAATTTTAACGAAGTCTTGAACGGCTTGCAAACCTTGAAGGCTTATAATGCTACTTCCCGT |
| | TTCATGGAAAAGAACAAGCGTTTGTTGAACAGAATGAACGAAGCCTACTTGTTGGTCATTGC |
| | TAATCAAAGATGGATCTCCGTTAACCTGGATTTGGTTTCTTGTTGCTTCGTGTTCTTGATCTCC |
| | ATGTTGTCCGTTTTTAGGGTGTTCGATATCAATGCTTCTTCCGTTGGTTTGGTTGTTACTTCCG |
| | TTTTACAAATCGGTGGCCTGATGTCATTGATTATGAGAGCTTATACCACCGTCGAAAACGAA |
| | ATGAACTCTGTTGAAAGATTGTGCCATTACGCCAACAAGTTGGAACAAGAGGCTCCTTACAT |
| | TATGAACGAAACTAAGCCAAGACCTACATGGCCAGAACATGGTGCTATTGAGTTTAAACATG |
| | CCTCCATGAGATACAGAGAAGGTTTGCCATTGGTTTTGAAGGATTTGACCATTTCAGTAAAA |
| | GGTGGTGAGAAGATTGGTATTTGCGGTAGAACAGGTGCTGGTAAGTCTACTATTATGAATG |
| | CCTTGTACAGGTTGACCGAATTGGCTGAAGGTTCTATTACTATCGATGGTGTCGAAATTTCTC |
| | AGTTGGGCTTGTATGATTTGAGATCCAAGTTGGCCATTATTCCACAAGATCCAGTTTTGTTCA |
| | GAGGCACCATTAGAAAGAATTTGGATCCATTTGGTCAGAACGATGACGAAACTTTGTGGGAT |
| | GCTTTAAGAAGATCCGGTTTAGTTGAGGGTTCTATCTTGAATACCATCAAGTCCCAATCTAAG |
| | GATGATCCAAACTTCCATAAGTTCCACTTGGATCAAACTGTTGAAGATGAGGGTGCTAACTTT |
| | TCATTGGGTGAAAGACAATTGATTGCATTGGCCAGAGCTTTGGTTAGAAACTCTAAGATCTT |
| | GATCTTGGACGAAGCTACCTCTTCTGTTGATTACGAAACCGATTCCAAAATCCAAAAGACCAT |
| | CTCTACTGAATTCTCCCATTGCACCATTTTGTGTATTGCCCATCGTCTGAAAACCATCTTGACC |
| | TATGATAGGATCTTGGTTTTGGAAAAAGGTGAGGTTGAAGAATTCGATACACCAAGGGTCTT |
| | GTACTCTAAGAATGGTGTCTTTAGACAGATGTGCGAAAGATCTGAAATTACCTCTGCTGATTT |
| | CGTCTAA |
| SEQ ID | MTSPGSEKCTPRSDEDLERSEPQLQRRLLTPFLLSKKVPPIPKEDERKPYPYLKTNPLSQILFWWLN |
| NO: 934 | PLLRVGYKRTLDPNDFYYLEHSQDIETTYSNYEMHLARILEKDRAKARAKDPTLTDEDLKNREYPK |
| | NAVIKALFLTFKWKYLWSIFLKLLSDIVLVLNPLLSKALINFVDEKMYNPDMSVGRGVGYAIGVTF |
| | MLGTSGILINHFLYLSLTVGAHCKAVLTTAIMNKSFRASAKSKHEYPSGRVTSLMSTDLARIDLAIG |
| | FQPFAITVPVPIGVAIALLIVNIGVSALAGIAVFLVCIVVISASSKSLLKMRKGANQYTDARISYMREI |
| | LQNMRIIKFYSWEDAYEKSVVTERNSEMSIILKMQSIRNFLLALSLSLPAIISMVAFLVLYGVSNDK |
| | NPGNIFSSISLESVLAQQTMMLPMALATGADAKIGLERLRQYLQSGDIEKEYEDHEKPGDRDVVL |
| | PDNVAVELNNASFIWEKFDDADDNDGNSEKTKEVVVTSKSSLTDSSHIDKSTDSADGEYIKSVFE |
| | GFNNINLTIKKGEFVIITGPIGSGKSSLLVALAGFMKKTSGTLGVNGTMLLCGQPWVQNCTVRDN |
| | ILFGLEYDEARYDRVVEVCALGDDLKMFTAGDQTEIGERGITLSGGQKARINLARAVYANKDIILL |
| | DDVLSAVDARVGKLIVDDCLTSFLGDKTRILATHQLSLIEAADRVIYLNGDGTIHIGTVQELLESNE |
| | GFLKLMEFSRKSESEDEEDVEAANEKDVSLQKAVSVVQEQDAHAGVLIGQEERAVNGIEWDIYK |
| | EYLHEGRGKLGIFAIPTIIMLLVLDVFTSIFVNVWLSFWISHKFKARSDGFYIGLYVMFVILSVIWITA |
| | EFVVMGYFSSTAARRLNLKAMKRVLHTPMHFLDVTPMGRILNRFTKDTDVLDNEIGEQARMFL |
| | HPAAYVIGVLILCIIYIPWFAIAIPPLAILFTFITNFYIASSREVKRIEAIQRSLVYNNFNEVLNGLQTLK |
| | AYNATSRFMEKNKRLLNRMNEAYLLVIANQRWISVNLDLVSCCFVFLISMLSVFRVFDINASSVG |
| | LVVTSVLQIGGLMSLIMRAYTTVENEMNSVERLCHYANKLEQEAPYIMNETKPRPTWPEHGAIE |
| | FKHASMRYREGLPLVLKDLTISVKGGEKIGICGRTGAGKSTIMNALYRLTELAEGSITIDGVEISQLG |
| | LYDLRSKLAIIPQDPVLFRGTIRKNLDPFGQNDDETLWDALRRSGLVEGSILNTIKSQSKDDPNFHK |
| | FHLDQTVEDEGANFSLGERQLIALARALVRNSKILILDEATSSVDYETDSKIQKTISTEFSHCTILCIA |
| | HRLKTILTYDRILVLEKGEVEEFDTPRVLYSKNGVFRQMCERSEITSADFV |
| SEQ ID | ATGCCCACAATAAGACAAGAGCTGCGTCACTCTTCCAGTGGAAGTGAGAATGAGAAAGCCG |
| NO: 935 | AGTCGCTATATGTCAAGAACGAAGGAAAGCTTGACAAAGTTGCAACGCAGAACAGTTATTAT |
| | GAGGTGGACCGTAATAGACCGGAGACTTTTATGAATAGTGACGACTTAGAGAAAGTGACGG |
| | AGTCAGAGATATATCCCCAGAAACGTATGTTTAGCTTTCTACATAGCAAGAAGATACCACCG |
| | ATCCCTACTGACGAGGAGCGTCCTGTGTATCCCCTATTCCACGCAAATTGGATATCAAGGATA |
| | TTCTTCTGGTGGGTCTTTCCCATCTTAAGGGTCGGATATAAAAGGACTCTTCAGCCTGGAGAC |
| | TTATGGAAAATGGACGACAGGATGAGTATTGAGACTCTATATGCCGACTTTGAGAGGTATCT |
| | GGAAGTGTATAGGGAGAAAGCCAGGGTTCAATATAGGAAGGAGCACCCTAACGCGACAGA |
| | AGAGGAAATAATAGAGAATGCTGTCATGCCTAAGCATACTCTGGTCAAAGTGCTTTTATATA |
| | CATTTAAATGGCAGTATTTCTTAGCCTTCGCCGCGATGGCATTATCCAACGCAGCATCAGCCT |
| | TCTTACCGATGGTTACAAAGAGGCTTATTGATTTTGTCAGTGAGAAAAGCTTCTATCCTGGGT |
| | TAAAAGTGAACGCAGGAGTAGGCTACGCCATCGGGTCATGTGTCATGATGTTACTAAATGG |
| | AGTCCTGTTCAATCATTTCTTTCACAATAGTCAGCTTACGGGCGTCCAGGCTAAATCTGTATT |
| | AATCAAAGCCATACTTACTAAATCTATGAAACTTTCAGGCTTTAGTAGGCACCGTTTTCCTAG |
| | CGGCAAAATAACTTCCATCATGAGTACGGATTTATCTAGGTTAGAACTAGCAATAATTTTCCA |
| | GCCGTTACTAGGAGCGTTCTTCGTGGCCGTCGCGATTTGCATAGTTTTATTAATCATAAATCT |
| | TGGCCCGATAGCCCTTGTCGGGGTGGGCATATTCGTCGTAGCAATGTTCTTTTCCGCCTATGC |
| | TTTTAAACGTCTAATCTCTGTGAGGAAGAAGACAAATATATTTACAGACGCTCGTGTCACTAT |
| | GATGCGTGAGATCTTGAATTCGATGAAAATGATCAAATTTTATGCATGGGAAGACGCATACG |
| | AGGCATCAGTGCACGATCAACGTTCGAAGGAGATAAGCAAAACGAGGATTATGCAATTTAC |
| | TAGGAACTTTGTAACCGCATTAGCAGTCTGTTTAACTAATATCTCCAGTATGGTGACCTTTCT |
| | AGCATTGTATAAGGTACGTAATCACGGCCGTACCCCTGCTAATATATTCTCCAGCTTAAGTCT |
| | GTTTCAAGTTCTTAGCATACAGATGTTCTTTCTACCCATGGCGTTAGGCACAGCCGTGGACGG |
| | ATCCATCGCACTTAACCGTTGTCAGGAACTTTTCGAGGCCACCGAGGAAGAGCATGACATAG |
| | ACGTAGACTTTCCCCCTTGCGACGACCCCGACTTAGCACTTAAGGTAGTAAATGGGTCCTTTG |
| | AGTGGCAGGACTTCGAGGCTGAGGAGAATAGGTTAGCGACATTAATGGAGATAGAGGAGA |
| | AGAAGAAGAAGAAAACGAAAAGTAAGAAGGACAAAGCACCCGAGCCAAAGCACGAGGCA |
| | GCATCAATAAAACCCGGCCACCTAAGCGACACAGAGAGAGAGTCATTCAAAGGGTTTCATA |
| | ATTTAAATTTCGAAGTTAAGAAGGGCGAATTAATAATTATAACCGGATCTATCGGCACCGGC |
| | AAGACAAGTCTGTTAAACGCGTTGGCCGGATTTATGCGTAAAACAGAGGGAGACGTATATA |
| | AGAATGGTTCTCTATTACTTTGCGGATACCCGTGGGTACAGAATGCAACAGTCCGTGATAAC |
| | ATTCTGTTTGGATCCCCGTACGACAAAGCTAGGTATAAAGAGGTCATACGTGTGTGCTCGCT |
| | TCAGGCTGACTTAGACATATTACCCGCGAATGACAAAACAGAGATCGGAGAGAGGGGTATT |
| | ACCTTATCAGGCGGACAGAAGGCCAGGATAAATTTAGCGAGGTCTGTATATAAGTCAATGG |
| | ACACATATCTGTTTGACGACGTGCTAAGTGCCGTGGACGCACGTGTCGGCAAACATATCATG |
| | GACGAGTGCATGTTAGGGAGATTAGGAAATAAGACGCGTATCTTAGCCACACATCAATTATC |
| | GTTAATAGACCGTGCAAGCCGTGTGATCTTCTTAGGTACTGACGGATCCTTCGACTTTGGATC |
| | AGTCACGGAACTTAAGAAACGTAATGCAGGTTTCAATAAACTAATGGAGTTTGCTAATAAAT |
| | CATCAGATAAGGAAGAAGGAGAGCTGGACAGTACCGAGGCAAGCGGCGACGACGTTTCAA |
| | CAGCAGAGGAGTTAGAGCATTTTAGGGACGACGACGGCCAGCGTGAGATGGATGCGTCTA |
| | GATTGAAGAAGGAGTTATCAAAACGTTCGTATGAATCTAGTGTGGATGAGAACGAGGCCGC |
| | AGGAAGGCTGATGGCAAAGGAAGAGCGTGCAGTGAATAGCATCGGCTTTGATGTATATAAG |
| | AATTATATATCGGCAGGAGTGGGAAAGAAAGGATTCGTACTGCTTCCATTTTATGTGATTTT |
| | ACTTGCAGTCACGACATTTTCGCTTCTATTCAGTAGTGTTTGGTTATCATTCTGGACTGAAGA |
| | CAAATTCAAGAGGCAGGCTGGCTTCTATATGGGTATGTATATATTCTTCGTATTCTTCAATTA |
| | CTTTTGCACTACCGGCCAGTTTACATTACTTTGCTACCTGGGACTTACAGCGTCGAAAATGTT |
| | AAACCTGAAAGCAGTAAAGAGGATTCTGCACACACCTATGTCATTTATCGACACGACGCCTA |
| | TCGGACGTATTTTAAATAGGTTTACCAAAGACACAGACACATTAGACACTGAGCTGACCGAG |
| | TCGGTCAGACTGTTTGTGTATCAGACAGCAAATATCATTGGGGTAGTGATAATGTGTATTATT |
| | TATCTACCCTGGTTTGCGATAGCAGTCCCGTTTCTTGTAATTATATTTGCACTTGTGGCCAATC |
| | ATTATCAGAGCTCGTCTAGGGAGATTAAAAGATTAGAGGCTATTCAGAGGAGCCACGTGTTT |
| | AATAATTTTAATGAGGTGTTGGGCGGCATCGATACGATAAGGGCATATAGAGGGCAGGAGC |
| | GTTTTCTAATGAAGAATGATTTTCTAACAAATAAAATGAACGAGGCCGGATATTTAGTGGTA |
| | GCTGTCCAGAGGTGGGTCTCCATCGCTCTGGACATGATAGCGATGGCTTTTGCACTTATCATT |
| | GCATTATTGTGCGTCACTAGGCAATTTCACATATCACCTTCCTCGGTGGGAGTGTTGCTAACG |
| | TATGTATTACAGCTGCCCGGATTACTAAATACGCTAATGCGTGCAATGACGCAGGGAGAGAA |
| | TGACATGAACTCGGCTGAGCGTCTGATAGCGTACGCAACAGACTTACCTCTGGAAGCAAACT |
| | ATAGGAAACCTGAGATGACCCCTGCCGAGCCATGGCCTAGCCACGGAGAGATTGTGTTCGA |
| | CGACGTATCATTAGCCTATAGGCCTGGACTGCCTTTGGTACTTAAGAATGTGTCTATTGACAT |
| | AGGATCAGGAGAGAAAATTGGAATATGCGGACGTACTGGCGCAGGAAAATCAACGATCAT |
| | GACCGCTTTATACAGAATTTGTGAGCTTCACTCTGGAACCGTATCAATTGACGGAGTGGATA |
| | TCTCGAAAATTGGACTGTATGACTTACGTTCGAAATTATCCATAATACCTCAGGACCCGGTGT |
| | TATTTAAAGGGAGTATACGTCGTAATCTTGACCCCTTTAATGAGAGAACTGACGAGCAGCTT |
| | TGGGACGCCCTTGTCAGGAGCGGCGCAGTGGAAGCGTCAGAGATAGCCGAGGTCAAAGCC |
| | CAGTCGCCCGAGACATCAGGAGCATATGCCAACATGCACAAATTTCACCTTAGGCAGGAAGT |
| | AGAGGACGATGGATCAAACTTCAGCCTAGGAGAACGTCAGCTACTAGCGTTAACCAGGGCC |
| | CTTGTTAGGCAGTCGAAAATACTTATTCTAGACGAGGCAACCTCGTCGGTCGACTATGAGAC |
| | AGACGCCAAAATTCAGGCGAAAATTGTACAGGAGTTTTCGAGCTGCACAATATTATGTATCG |
| | CTCACCGTCTAAATACTATCCTAGACTATGACAGGATATTGGTCCTGGAGCAAGGCTCAGTA |
| | GCGGAGTTCGACACGCCTAAAGCGTTATTCCGTGCTGGCGGGATATTCACGGAGATGTGCC |
| | AGCGTAGTGGAATAACTTCGGCAGACTTCAAGGAAAATTGA |
| SEQ ID | MPTIRQELRHSSSGSENEKAESLYVKNEGKLDKVATQNSYYEVDRNRPETFMNSDDLEKVTESEI |
| NO: 936 | YPQKRMFSFLHSKKIPPIPTDEERPVYPLFHANWISRIFFWWVFPILRVGYKRTLQPGDLWKMDD |
| | RMSIETLYADFERYLEVYREKARVQYRKEHPNATEEEIIENAVMPKHTLVKVLLYTFKWQYFLAFA |
| | AMALSNAASAFLPMVTKRLIDFVSEKSFYPGLKVNAGVGYAIGSCVMMLLNGVLFNHFFHNSQL |
| | TGVQAKSVLIKAILTKSMKLSGFSRHRFPSGKITSIMSTDLSRLELAIIFQPLLGAFFVAVAICIVLLIIN |
| | LGPIALVGVGIFVVAMFFSAYAFKRLISVRKKTNIFTDARVTMMREILNSMKMIKFYAWEDAYEA |
| | SVHDQRSKEISKTRIMQFTRNFVTALAVCLTNISSMVTFLALYKVRNHGRTPANIFSSLSLFQVLSI |
| | QMFFLPMALGTAVDGSIALNRCQELFEATEEEHDIDVDFPPCDDPDLALKVVNGSFEWQDFEAE |
| | ENRLATLMEIEEKKKKKTKSKKDKAPEPKHEAASIKPGHLSDTERESFKGFHNLNFEVKKGELIIITG |
| | SIGTGKTSLLNALAGFMRKTEGDVYKNGSLLLCGYPWVQNATVRDNILFGSPYDKARYKEVIRVC |
| | SLQADLDILPANDKTEIGERGITLSGGQKARINLARSVYKSMDTYLFDDVLSAVDARVGKHIMDE |
| | CMLGRLGNKTRILATHQLSLIDRASRVIFLGTDGSFDFGSVTELKKRNAGFNKLMEFANKSSDKEE |
| | GELDSTEASGDDVSTAEELEHFRDDDGQREMDASRLKKELSKRSYESSVDENEAAGRLMAKEER |
| | AVNSIGFDVYKNYISAGVGKKGFVLLPFYVILLAVTTFSLLFSSVWLSFWTEDKFKRQAGFYMGM |
| | YIFFVFFNYFCTTGQFTLLCYLGLTASKMLNLKAVKRILHTPMSFIDTTPIGRILNRFTKDTDTLDTEL |
| | TESVRLFVYQTANIIGVVIMCIIYLPWFAIAVPFLVIIFALVANHYQSSSREIKRLEAIQRSHVFNNFN |
| | EVLGGIDTIRAYRGQERFLMKNDFLINKMNEAGYLVVAVQRWVSIALDMIAMAFALIIALLCVTR |
| | QFHISPSSVGVLLTYVLQLPGLLNTLMRAMTQGENDMNSAERLIAYATDLPLEANYRKPEMTPA |
| | EPWPSHGEIVFDDVSLAYRPGLPLVLKNVSIDIGSGEKIGICGRTGAGKSTIMTALYRICELHSGTVS |
| | IDGVDISKIGLYDLRSKLSIIPQDPVLFKGSIRRNLDPFNERTDEQLWDALVRSGAVEASEIAEVKA |
| | QSPETSGAYANMHKFHLRQEVEDDGSNFSLGERQLLALTRALVRQSKILILDEATSSVDYETDAKI |
| | QAKIVQEFSSCTILCIAHRLNTILDYDRILVLEQGSVAEFDTPKALFRAGGIFTEMCQRSGITSADFK |
| | EN |
| SEQ ID | ATGGCCGAATTGGAAAAGGGTGATGAAGCTCAACCAGCTTTACAACATAGATTGTGTACACC |
| NO: 937 | CTTGTTGTCCAAAAAGGTTCCACCAGTTCCAAGAGATGAAGATAGACCAGTTCATCCAAAAG |
| | CTACCAATCCATTCTCTTGGTTTTTCTTCACTTGGTTGACTCCAGTTTTGTTGAGAGGTTACAA |
| | GAGAACTTTGTTGCCAGAGGATATGTTCAAGTTGCATGACGAAATGACCGTTGAACATTTGG |
| | CTGGTAAGTTCCAAGCTATCTTCGATAGAAGATTGGCTGCTGATAAGAAGAAGTACTTGAAG |
| | AGAAGAAGGCAATTGGCCTTGAAGAAAGGTGATTCTGATGTTTCTGCTAGAACCGACGAAG |
| | ATTTGATGTTGGAATACGAACCATCTAAGTCCCTGTGTTTCTTGTCCTTGTACGAAACATTTTT |
| | GTGGCAATACTCCATGGCTTTGTTGTTCGGTATGTTGGGTTTAGTTGGTCAAGCTTGTAATCC |
| | TTTGTTGTCCCGTAAGTTGATTAACTTCGTTGAATTGGAAGCCTTGGGTATCCCAACAAAAAT |
| | TGGTACTGGTATTGGTTACGCTTTCGGTGTTGCTATTTTGATGTTTGTTTCCGACGTCTTGCAC |
| | AATCAAGGTGTTTATTTTGCTATGTTGACCGGTGCTCAAATTAGAGCTATTTTCACAAAAGCC |
| | CTGCTGGACAAGTCTTTCAAATTGAATACCAGATCGAGGAAGAAGTTCCCACCATCTAAAAT |
| | TACCTCCATCATGTCTACCGATGTTTCCAGAGTTGACTTAGGTACAGGTTTTTCTATCTACGGT |
| | TTCGTCTTGATTTTCCCAGTTGGTGTTTCCATTGGTATCCTGATCTACAATATTAAGGCTCCAG |
| | CTATGGTTGGTGTCGGTTTGATGTTAGCTTTTGTTTTTGTTAGCGGTGGCTTGTCTACCTTGTT |
| | GTTCTCTTTTAGAAAAACTGCTCAAAAGGCCACCGATTCTAGAGTTGGTTATATGAAGGAAG |
| | TCCTGAACAACCTGAAGATGATCAAGTTTTACTCTTGGGAAAAGCCATACCATGCCTTGATTA |
| | CTAAGATCAGACGTAGAGAAATGGCCTACTTGTTGAGAATGGAAATTACCCGTATGATCATT |
| | ATTACCTTGGCTGCTTCTTTGGCCTTGGTTTCATCTTTGGTTTCTTTCTTGACGTTGTACGCTAT |
| | TGCTTCTCCATCTTCTAGAAATCCAGCCGAAATTTTCTCCTCCGTTTCTTTGTTTAACTTGTTGG |
| | CCTCTCAATTCTTGGTCTTGCCATTGTCTATTGCTGGTTCTACTGATGCATTTTTGGGTATGAA |
| | TAGAGTTGCTGCTGTTTTAGCTGCTGACGAAATTGATCCAGAAGATGCTGATACCATCTTGTC |
| | TGAAAGAACTCAAGCTTTGTTGGAGGAAAAGAAGTTGGCTATTACTGTTCAAGACGGTGAAT |
| | TTGAATGGGAGTTGTTTGATTTCGACGACGAAAAGTCCGAAGAAAAAGAAGAACATAAGGA |
| | CGAGAGCAAGAAGAAGAAGAAGAAAGAGTCTAAGAAGAAGGTCAAAAAGTCCGCCAAAGA |
| | TGTCTCTGATACTTCTTCAGCTTCCTCTAACGAAAAAGAGAGGAAGTCTTTTAAGCTGCACAA |
| | CGTTAACTTGGACATTAGACAAGGTGCCTTCGTTGTTATTACAGGTTCTATTGGTTCCGGCAA |
| | :GTCATCTTTGTTGCATGCTTTGGATGGTGCCATGAAGAAATTGTCTGGTGATGTTTACGTTAA |
| | CGGCTCTTTGTTGATGTGTGGTACTCCTTGGATTCAATCTGCTTCATTGAGAGAGAACATCTT |
| | GTTCGGTTCTACCTATGACGAGAAGTGGTACAAAGAAGTTATTAGAGCTTGCTCCTTGGAAT |
| | CCGATTTCGATATTTTGCCAGCTGGTGATTTGACCGAAATTGGTGAAAGAGGTATTACTTTGT |
| | CCGGTGGTCAAAAGGCTAGAGTTTGTTTGGCTAGAACTGTTTACGCTAACTCCTCCATTATCT |
| | TGTTGGATGATGTTTTGTCTGCTGTTGATGCCAAGGTTGGTAAACATATTATGTCCGAATGCA |
| | TCATGGGTATCTTGAAGGGTAAAACTAGAGTTTTGGCTACCCACCAATTGTCCTTGATTTCTG |
| | AAGCTGAACACGTCATTTTCTTGAACGGTGATGGTACTATTTCCAGGGGTACTTTTGAAGAAT |
| | TGAAGTCTACCAACTCTGCCTTCAAGGCTTTGATGGAACATAACAGAAAGTCTGAAGAGAAC |
| | GATGAGGATGAATCAGAACCAGCTTCTGAAGTTGAAGCCTCTGAAAAAGAATTGATCAAGA |
| | GACAGTTGACCAAGCAAACTACTACCCAAGTTTCTTCCGATTCCGTTGAAAAAGTAGAATTG |
| | GATGGCAAGTTGTACGACGAAGAAGAGAAATCTGTTAACGCTATTGGTTGGGATGTTTATG |
| | GTCGTTACATTTTGACTGGTGTCCAAGGTTTTAAGTTCAACTGGTTGTTGTTTGTGATCCTGTG |
| | CTTGTGTATTTTGGGCACTTTTATGTCTCTGTTCACCAACAATTGGCTGTCTTTTTGGATCTCC |
| | AGAAAGTTTGATCAACCAGCCGGTTTTTACATTGGTTTTTACGCTGCTTTTACCGGTTTGGCT |
| | GTTATCTTGATGGTTTTCCAGTTCTGCTCCATCATCTTCGTTATGAACAGAGCCTCTAGGATCT |
| | TGAACATTAAGGCTTTGGGTAAGATCTTGCACGTTCCAATGTCTTTCATGGATACAACTCCAA |
| | TGGGTAGAATCTTGAATAGATTCACCAAGGATACCGACACCTTGGATAATGAGATTGGTGAT |
| | AGAGTCGGTATGGTTGTTAACTTCACTTTCGAAATTTGGGGCGTTATCATCATGTGCATTATC |
| | TACATGCCATGGTTTGCTATTGCTGTTCCTTTTATCGTTGCCGTGTTCATTATTATGGCTAACT |
| | TCTATCAAGCCTCCGGTAGAGAAGTTAAGAGATTGGAAGCTGTTCAAAGATCCCACGTTTAC |
| | AACAACTTCAACGAATCTTTAACTGGTATGCCAACCATTAAGGCCTTCAAGTCCATTCAGAGA |
| | TTCTTGAACAAGAACGTTGCCACGATTAACAAAATGGATGAAGCTTACTTCGTTACCGTCGCT |
| | AATCAAAGATGGTTGGATACTTACTTGTCTTTGTTGGCTACTTTGTTCGCCTTGTTGATTGCTT |
| | TATTGTGTGTCTGCAGAGTGTTCGATATTGGTGCTTCAGCTGTTGGTTTGTTAGTTTCTTATGT |
| | CTTGCAGATCTCCGGCTTGATTTCAATGTTGGTTGTCGTTTTCACCCAAGTCGAACAAGACAT |
| | GAATTCTGCTGAAAGAGTTATGGACTACGTCTACAAGATTCCACAAGAAAGACCATACGAAA |
| | TCTCCGAAACTAGACCACCACCAGAATGGCCTCAAAATGGTGAAATTAGATTCATCAACGTC |
| | GACTTCGCTTACAGAGAAGGTTTGCCATTGACTTTGAGAAACATTAACGCCGATATTAAGCC |
| | ACACGAAAAGATTGGTATTTGCGGTAGAACTGGTGCTGGTAAATCTTCAATTATGGTCGCTT |
| | TGTTCAGAATCGCCGAATTGACTTCTGGTTCCATTATGATTGATGGCATCGATGTTTCTACTTT |
| | GGGCTTGCATGAATTGAGGTCCAACTTGTCTATTATCCCACAAGATCCAGTCTTGTTTAAGGG |
| | CACTATCAGATCTAATTTGGACCCATTCGAAACTAAGACCGATGATGAATTATGGGATACTTT |
| | GCGTAGAGCTGATATTATTGATGCTGCCTCTTTGGAACATGTTAAGACTCAACGTGTTGGTG |
| | ATGATGATTTCCATAAGTTCCACTTGGATAACGAAGTTGACGATGAAGGTGAAAACTTCTCTT |
| | TGGGCGAAAAACAATTGGTTGCATTTGCTAGAGCTTTGGTTAGAGATACCAAGATCATTGTC |
| | TTAGATGAAGCCACCTCTTCTGTTGATTATGCCACTGATTCTAAATTGCAGAAGGCCATCGTT |
| | AGGGAATTCTCTGATAGAACCATTTTGTGCATTGCCCACAGGTTGAAAACTATCTTGCATTAC |
| | GATAGAGTCATCGTCATGGAACAGGGTGAAATCAAAGAATTCGATACTCCATCTCACCTGTA |
| | CAACTCTACTGGTACAATCTTTAGACAAATGTGCGACAAGTCCGGCATCTCTAAAGAAGATTT |
| | TTACGAGTGGTAA |
| SEQ ID | MAELEKGDEAQPALQHRLCTPLLSKKVPPVPRDEDRPVHPKATNPFSWFFFTWLTPVLLRGYKR |
| NO: 938 | TLLPEDMFKLHDEMTVEHLAGKFQAIFDRRLAADKKKYLKRRRQLALKKGDSDVSARTDEDLML |
| | EYEPSKSLCFLSLYETFLWQYSMALLFGMLGLVGQACNPLLSRKLINFVELEALGIPTKIGTGIGYAF |
| | GVAILMFVSDVLHNQGVYFAMLTGAQIRAIFTKALLDKSFKLNTRSRKKFPPSKITSIMSTDVSRV |
| | DLGTGFSIYGFVLIFPVGVSIGILIYNIKAPAMVGVGLMLAFVFVSGGLSTLLFSFRKTAQKATDSRV |
| | GYMKEVLNNLKMIKFYSWEKPYHALITKIRRREMAYLLRMEITRMIIITLAASLALVSSLVSFLTLYA |
| | IASPSSRNPAEIFSSVSLFNLLASQFLVLPLSIAGSTDAFLGMNRVAAVLAADEIDPEDADTILSERT |
| | QALLEEKKLAITVQDGEFEWELFDFDDEKSEEKEEHKDESKKKKKKESKKKVKKSAKDVSDTSSAS |
| | SNEKERKSFKLHNVNLDIRQGAFVVITGSIGSGKSSLLHALDGAMKKLSGDVYVNGSLLMCGTP |
| | WIQSASLRENILFGSTYDEKWYKEVIRACSLESDFDILPAGDLTEIGERGITLSGGQKARVCLARTV |
| | YANSSIILLDDVLSAVDAKVGKHIMSECIMGILKGKTRVLATHQLSLISEAEHVIFLNGDGTISRGTF |
| | EELKSTNSAFKALMEHNRKSEENDEDESEPASEVEASEKELIKRQLTKQTTTQVSSDSVEKVELDG |
| | KLYDEEEKSVNAIGWDVYGRYILTGVQGFKFNWLLFVILCLCILGTFMSLFTNNWLSFWISRKFD |
| | QPAGFYIGFYAAFTGLAVILMVFQFCSIIFVMNRASRILNIKALGKILHVPMSFMDTTPMGRILNR |
| | FTKDTDTLDNEIGDRVGMVVNFTFEIWGVIIMCIIYMPWFAIAVPFIVAVFIIMANFYQASGREV |
| | KRLEAVQRSHVYNNFNESLTGMPTIKAFKSIQRFLNKNVATINKMDEAYFVTVANQRWLDTYLS |
| | LLATLFALLIALLCVCRVFDIGASAVGLLVSYVLQISGLISMLVVVFTQVEQDMNSAERVMDYVYKI |
| | PQERPYEISETRPPPEWPQNGEIRFINVDFAYREGLPLTLRNINADIKPHEKIGICGRTGAGKSSIM |
| | VALFRIAELTSGSIMIDGIDVSTLGLHELRSNLSIIPQDPVLFKGTIRSNLDPFETKTDDELWDTLRRA |
| | DIIDAASLEHVKTQRVGDDDFHKFHLDNEVDDEGENFSLGEKQLVAFARALVRDTKIIVLDEATSS |
| | VDYATDSKLQKAIVREFSDRTILCIAHRLKTILHYDRVIVMEQGEIKEFDTPSHLYNSTGTIFRQMC |
| | DKSGISKEDFYEW |
| SEQ ID | ATGTCCGAACCACCAAGACAGAAGAGAATTTTGTCTTGGGCTTTGTCTAAAAAGGTCCCACC |
| NO: 939 | AATTACTCAAGAAGAGGACAGATTGGAATACCCATTCAAGAGAGCTAACATCCTGTCCAAGA |
| | TTTTCTTCTCTTGGTTGGATCCTTTGTTGCACAAGGGTTATAGAAGAACTTTGGAACCTGAAG |
| | ATTTGTGGTACTTGACCGATGAATTGAAGTTGGAACATTACTACTCCGTTTTCTTGGCTCAAT |
| | TCGAACCAGATTTGGCTGCTAGAAGAGAAGCTCATTTGGAAGCTAAATGTAAGGCTAGAGG |
| | TGAAACTTTCGAAACTTCTACTGTTACCGAAGATGAGGATTTGGCCGATTTTGTTTATCCATG |
| | GCCAAAGTTCGGTCTGATCTTGTTGAAAACTTTCTTCAGACAATACGTTGGTGCCTGCGTTTT |
| | GAAAACTATTGGTGATTTGGCTTCTACTACTGCTCCCTTGTTGCAAAAAGCTTTGATTAACTA |
| | CGTTACCAAGAGAGCCAAAGGTTTGGAGCCAAATGTTGGTACTGGTGTTGGTTATGCTATTG |
| | GTTGTGCTTTGTTCGTTACTTTGGAAGGTTTGATGGTCAACCATTACTTCTACCATGCTATGGT |
| | TACTGGTTCTCAAGTTAAGGCTATTCTGACCAAGTTCATGTTGGAAAAGTCTTTCAGACAAAC |
| | CGGTAGATCCAGACATGATTTTCCAACTGGTAAGGTCAACTCCATTATGGGTACTGATTTGG |
| | CCAGAATTGATTTCGCAATTGGTTTCTTGCCATTCTTGTTCTGTTTTCCAGTTCCAGCTATTGTC |
| | TCCATCGTTTTGTTGATCATCAATATCGGTCCATCCTCCTTGGTTGGTATTGCCATTTTCTTTTT |
| | GGCTTTGATTGCTTTGGGTTCCACCATCAAAAGATTGATGTTCTTCAGATTGAGGGCCAACAA |
| | GTTTACTGATGGTAGAGTCAATTTGGTCAAAGAGCTGTTGAAGAACTTCAAGATGATCAAGT |
| | ACTACTCCTGGGAACCATCTTACGTTAAGAACATTGAAGAAACCAGAACCGCCGAAATGCAC |
| | AATGTTTTCTTGATGCAAATCATGAGGAACATCATGGTTGCTTTCGCTATTGCTTTGCCAACT |
| | GTTTGCTCTATGATTTCCTTTTTGGTCTTGTACGGCATCAACTCCTCTAGATCTGTTGCTGATA |
| | TTTTCTCCTCCTTGACCTTGTTTCAAGTCTTGGCTATGCAATTGATCATGGTCCCATTGGCTTT |
| | GGCATCTGGTTCTGATGCTTTAATTGGTATCAGAAGAGTCTTGGAATTCGTTTGCTCTGGTGA |
| | TATCGATGAAGAAGATTCCCAAGTCGAACTGTCCTTGATCAAAGAAAAGATGGAATCCTCTG |
| | GTTCCGTTTTGAGAGTTGTTAATGCTTCTTTCGAATGGGAAACCTTCGATGCTGACGAAGAA |
| | GATATTGCTTCTACCAACGAATCCGTGTCTGAAAACGAAAGAAAACCAGATCCATCCTTGGA |
| | AGGTCTAGAATCTACATCTTTTCCAGGCTTGAACAACATCAACCTGGATATTAGAAAGGGTG |
| | AATTCGTTGTTGTCACCGGTTTGATTGGTTCTGGTAAATCTTCTTTGTTGTACGCCTTGTCTGG |
| | TTTCATGCATAGAACTCAAGGTCATGTTGCTACAATCGGTGATTTGTTGTTGTGTGGTAATCC: |
| | CTGGATTCAAAATGCTACCGTTAAGGACAATATCAGCTTCGGTATGCCATTTGACCAACAAA |
| | AGTACGATAACGTCATTCACGCTTGTTCATTGGAAGCAGATTTGGATTTGTTGCCAGCTGGT |
| | GATCATACTGAAGTTGGTGAAAGAGGTATTACTTTGTCTGGTGGTCAAAAGGCTAGATTGAA |
| | TTTGGCTAGAGCTGTTTATGCCGATAGAGACATTATCTTGTTGGACGATATTTTGTCCGCTGT |
| | TGATGCTAGAGTTGGTAAGCACATTATGGATGAATGTTTGTTGGGTCTGTTGAAGGATAAGA |
| | CCAGATTATTGGCTACCCATCAGTTGTCTTTGATTTCTGCTGCTGATAGAGTCATCTTCTTGAA |
| | CGGTGATGGTTCTATTGATGTAGGTACTACCGCTGAATTGCTGGCTAGAAATGAAGGTTTTA |
| | CCAAGCTGATGGAATTCAGCACTCAAGAAAAGAACGATACCACTACTGAATCTGGTGAAGCT |
| | GCTCATTCAGGTCCAGAATTGGAAGATGAGAAAGAATTGATCAGAATCCAGACCTTGACTAA |
| | GTCTTTGGCTGAAGCTGAATCTAACTCTGACTACCAACATAAGGATGCTGATGGTGTTTTGAT |
| | GCAGTTGGAAGATAGAGCCGTTAACGCTATTGAATTGGGTGTTTACGGTAAATACTTGAAGT |
| | TAGGTGCTGGTGCTTTTGGTATTGGTATTATCCCTTTGTTGTTAGGTTTGGTTGCTTGCTCTGT |
| | CTTTTGTTCTTTGTTCACTAACACCTGGTTGACTTTCTGGACTGAAAAGAAATTCGATAGGTCC |
| | AACGGTTTCTTTATCGGTATCTACGTTATGTTCACCATGCTGACTATCGTTTTCATGGTCTTGG |
| | AGTTCAGCTTGTTGGTTTACTTGACTAATACTGCCTCTAGGCTGTTGAACATCTACGCTATTA |
| | GAAGGTTGATGCACGTTCCAATGTCTTTCATGGATACAACTCCAATGGGTAGAATCTTGAAC |
| | AGATTCACTAAGGATACCGATGTCTTGGATAACGAATTGCCAGAACAAATTAGGTTGTTGGT |
| | TCATTTCACCGGTACTATCACTGGTATTTTGGTTTTGTGCATCATCTACTTGCCATGGTTCGCT |
| | ATTTCTGTTCCAATTTTGGCCTTCTGCTATATTGCTTGCGCTTCTTATTATCAAGCTTCCGCTAG |
| | AGAAGTCAAGAGAATTGAAGCTTTACAGAGGTCCTTCGTCTACTCCAATTTTAACGAAACATT |
| | GCAAGGCATGGAAGTTATTACTGCTTACAAAGCTGAGAAGAGGTTTATCGCAAGAAACGAT |
| | GCATTGATCGACAAGATGAACGAAGCTTACTACTTGACTTTCGCTAACATGAGATGGTTGTC |
| | CATTAGAATTGATGTTTTGGCTGCAGTCTTGGTCTTGATTGTCTCTTTGTTATGCGTCATGAG |
| | AGTGTTCCATATTTCTCCAGCTTCAGTCGGTTTGTTATTGTCTTACACTTTGAACATTGCCGGC |
| | ATGATGTCTATGTTGTTGAACGTTTCTACCCAGATCGAAAACGAGATGAACTCTGTTGAAAG |
| | ATTGGAGTACTACGGTTTCAGAGTTGTACAAGAAGCCCCATTCAAAATCTCTGAAAAGACTC |
| | CACCACCAGAATGGCCACACGATGGTAGAATTCAGTTTGAAAATGTTACCTTGTGCTACAGA |
| | CAAGGTTTACCAGCTGTTCTGAAGAATTTGAACATGGATGTTAAGGGTGCCGAAAAGATTGG |
| | TATTTGCGGTAGAACTGGTGCAGGTAAGTCATCTATTATGACTGCCTTGTATAGATTGGCCG |
| | AAATGGAATCAGGTGGTAGGATTTTGATCGATGATATTGACATTTCTACCTTGGGCTTGCAC |
| | GATTTGAGATCCAGATTGTCTATTATCCCACAAGATCCAGTTTTGTTCAGAGGTTCTATTAGA |
| | GGTAACTTGGATCCATTCCATGAACACAAAGACGAATTATTGTGGGATGCCTTGAGAAGATC |
| | CGGTTTAATTGAAGGTTCTAAGTTGGATCAAGTGAAGCACCAAACTTTGGATGACGAAAACT |
| | TGCATAAGTTCCACTTGGGTCAAAACGTTGAAGATGATGGTACAAACTTCAGCTTGGGTGAA |
| | AGACAATTGCTAGCTTTAGCTAGAGCTTTGGTGAGAAACTCTAAGATCTTGATTTTGGATGA |
| | AGCCACCTCCTCTGTTGATTACGAAACTGATTCTAAGATCCAAACCACCATCTCTACTGAATTT |
| | GCTGGTTGTACTATTATGTGCATTGCCCACAGATTGAAAACCATCGTTAACTACGATAGGATC |
| | CTGGTTTTGGATAAGGGTGAAATTTCCGAATTTGATAAGCCATGGGCCTTGTTCCAAGATGA |
| | ATCTACTATTTTCAGGCAGATGTGTAACAAGTCTGGTGTTGTTGCAGAAGATTTCGAGAAGC |
| | AAAACTAA |
| SEQ ID | MSEPPRQKRILSWALSKKVPPITQEEDRLEYPFKRANILSKIFFSWLDPLLHKGYRRTLEPEDLWYL |
| NO: 940 | TDELKLEHYYSVFLAQFEPDLAARREAHLEAKCKARGETFETSTVTEDEDLADFVYPWPKFGLILLK |
| | TFFRQYVGACVLKTIGDLASTTAPLLQKALINYVTKRAKGLEPNVGTGVGYAIGCALFVTLEGLMV |
| | NHYFYHAMVTGSQVKAILTKFMLEKSFRQTGRSRHDFPTGKVNSIMGTDLARIDFAIGFLPFLFCF |
| | PVPAIVSIVLLIINIGPSSLVGIAIFFLALIALGSTIKRLMFFRLRANKFTDGRVNLVKELLKNFKMIKYY |
| | SWEPSYVKNIEETRTAEMHNVFLMQIMRNIMVAFAIALPTVCSMISFLVLYGINSSRSVADIFSSL |
| | TLFQVLAMQLIMVPLALASGSDALIGIRRVLEFVCSGDIDEEDSQVELSLIKEKMESSGSVLRVVNA |
| | SFEWETFDADEEDIASTNESVSENERKPDPSLEGLESTSFPGLNNINLDIRKGEFVVVTGLIGSGKS |
| | SLLYALSGFMHRTQGHVATIGDLLLCGNPWIQNATVKDNISFGMPFDQQKYDNVIHACSLEADL |
| | DLLPAGDHTEVGERGITLSGGQKARLNLARAVYADRDIILLDDILSAVDARVGKHIMDECLLGLLK |
| | DKTRLLATHQLSLISAADRVIFLNGDGSIDVGTTAELLARNEGFTKLMEFSTQEKNDTTTESGEAA |
| | HSGPELEDEKELIRIQTLTKSLAEAESNSDYQHKDADGVLMQLEDRAVNAIELGVYGKYLKLGAG |
| | AFGIGIIPLLLGLVACSVFCSLFTNTWLTFWTEKKFDRSNGFFIGIYVMFTMLTIVFMVLEFSLLVYL |
| | TNTASRLLNIYAIRRLMHVPMSFMDTTPMGRILNRFTKDTDVLDNELPEQIRLLVHFTGTITGILVL |
| | CIIYLPWFAISVPILAFCYIACASYYQASAREVKRIEALQRSFVYSNFNETLQGMEVITAYKAEKRFIA |
| | RNDALIDKMNEAYYLTFANMRWLSIRIDVLAAVLVLIVSLLCVMRVFHISPASVGLLLSYTLNIAG |
| | MMSMLLNVSTQIENEMNSVERLEYYGFRVVQEAPFKISEKTPPPEWPHDGRIQFENVTLCYRQ |
| | GLPAVLKNLNMDVKGAEKIGICGRTGAGKSSIMTALYRLAEMESGGRILIDDIDISTLGLHDLRSRL |
| | SIIPQDPVLFRGSIRGNLDPFHEHKDELLWDALRRSGLIEGSKLDQVKHQTLDDENLHKFHLGQN |
| | VEDDGTNFSLGERQLLALARALVRNSKILILDEATSSVDYETDSKIQTTISTEFAGCTIMCIAHRLKTI |
| | VNYDRILVLDKGEISEFDKPWALFQDESTIFRQMCNKSGVVAEDFEKQN |
| SEQ ID | ATGTCCGACTACGACTTGGAAGAAAACCATTTGGTTAGACAGAACAGGCTGTTGTCCTCTTT |
| NO: 941 | GTTCTCTAAAGAATTGCCTCCAATTCCAGAAGATGACGAAAGACCAGAACATCCAGAAAGAG |
| | ATGCTAACTTCTTCAGCAAGATTTTCTTCTGGTGGATGATCCCAGTTATGAACACTGGTTACA |
| | AGAGAACTTTGACCCCAAAGGATTTGTTCACCTTGTCCGATGATATTAAGGTTGAAACTATG |
| | GCTGCTAGGTTTATGGCTATTTTCACCTCTGATGTTGAAAGGGCCAAATTGAAACACGTTAA |
| | GAAAAAGTGTAAGAAGAGGGGCGAAACCTTGGAATCTTCTTCTGTTGATTTCGATACCGACG |
| | TCGAAGATTTTAAGGTTTCCCCAATTATGTTCTTCTTCACCATCTGGAAAACCTACAAGTACCA |
| | ATACTTTGCTGCTTCTGTTTGCTTGGCTATTGCTAATTCTGCTCAAGCTGTTAACCCTCTGTTG |
| | TTCAAAAAGTTGATTACCTACGTTGGTTTGAAGGCCTACGGTATTGAACAAGGTGTTGGTAA |
| | AGGTGTCGGTTATGCTATTGGTTCTTGCTTGATTGAATTCTTGGGTGCCGTTTTGTTCAACCA |
| | CTTCTTTTACAAAGCTATGATGACCGGTGCTGAAACTAAGGGTGTTTTGACAAAAGCTTTGTT |
| | GGAGAAGTCCTTCAGATTGTCCGCTGAATCTAAACATAAGTTCCCAGTTGGTAAGATCACCTC |
| | TATGATGGGTACTGATTTGTCCAGAATTGATTTGGCCTTGGGTTTACAACCATTCATCTTCGTT |
| | TTTCCCATTCCAATCGTTATCTCCATTGCCATCTTGATCGTTAACATTGGTGCTGTTGCTTTGAT |
| | TGGTATCGGTGTTATGTTGTTGTTCATGGCTGTTATTGGTGGTACTACTGCTAAGTTGTACTC |
| | CTATAGAACTAAGGCTAACAAGTACACCGATATCAGAGTCTCTTACATGAAGGAAGTCCTGA |
| | ACAACTTGAAGATGATCAAGTTCTATTCTTGGGAGCCACCTTACTACGAAAACATTTCTTCTA |
| | CTAGGACCAAAGAGATGGACATCATCTACAACATGCAAACCTTGAGATCTATCGTTACTGCTT |
| | TGGCTATGTCTTTGACTGGTTTTGCTTCTTTGGTTGCCTTCTTGGTTTTGTTCGCTGTTGATAAT |
| | GATAGAAAGAACCCAGCCTCCATCTTCTCCTCAATTTCTTTGTTTAACGTCTTGCTGACCCAGG |
| | TCTTTATGTTGCCAATGGCTTTAGCTACTTCTGCTGATGCTTTTGCTGGTGTAGGTAGAGTTTC |
| | TACTTTCTTGACTACTGGTGAAGTCGACCCAAAAGAATTGGAAACTGATATTTCAGCCGACGT |
| | CTTGCAGAGAATGGACAAAGAAGATGTTGTTATCGAAGTGAACAACGCCTCTTTTGAATGGG |
| | AGATTTTCGAAGATATCGAAGAGAAGGACCCAAAGAAAGAGAAAGAGGAAAAGAAAAAGG |
| | CTAAAAAGGCCGCCAAAGAGACTAAGAAATTGGCTAAACAAGCCAAGAACTCCCAAACTATT |
| | ACTCCATCCGAAGAAGAGTTGTCCAAGATTGATTCTCCAAAGTTCACCGAGAAAGAATTGTC |
| | TACCGAATCCAAGTCTGTTGAGGAAAAAGTTTTCGCCGGTCTGAACAACATTAACCTGTCTAT |
| | TGCCTTGTCCGGCTTTATGAAGAAAACTTCCGGTGAAGTTCTGGTCAGTTCATCTTTGTTGTT |
| | TAAGAAGAACGAGTTCGTTGTTATCACCGGTATGATTGGTTCTGGTAAGACTTCTTTGTTGAA |
| | GTGTGGTTACCCATGGATTCAAAACACTACCGTTAGAGAGAATATCGTTTTCGGTTCTGAAT |
| | GGGACGAAGAAAAGTACAACAGAGTTATTTTCGCCTGCTCTTTGGAATCCGACATTGAAATT |
| | TTGCCAGGTGGTGATTTGACCGAAATTGGTGAAAGAGGTATTACTTTGTCTGGTGGTCAAAA |
| | GGCTAGAATCAACTTAGCTAGAGCTGTTTATGGTGGTAGGGAAATCATTTTGATGGATGATG |
| | TTTTGTCTGCCGTTGATGCTAGAGTTGGTAAACACATTATGAACAACTGCATCCTGGATCTGT |
| | TGAAGGATTCTACTAGAATTTTGGCTACCCACCAGTTGTCTTTGATAGATTCTGCAGATAGGG |
| | TCATCTTCCTAAATGGTGATGGTTCTATTTCCGTCGGTACAAACGAAGAATTGCAAAAGTCTA |
| | ATCCAGGTTTCGCTGCTTTGATGGCTCATAATGCTAAAACTGAAGAGGACGATGAAGATGAG |
| | AAGATCGATGTTGATTTGGACAAGCAAAAGTTCGAAGAACACCACGAAGTTGAGAAAGAGT |
| | TGATTCAGAGACAAGTTACTAGAGCCTCTGCTGTTGATGAAGAAGCTATTAGAAAGGACTAC |
| | AACAAGAACGTGGAAGAAGATGGTCATTTGATCGAAGATGAGGATAGAGGTGTTAACGCTA |
| | TTGCTTTGGATGTTTACTTGACCTACGTTAAGTTAGGTTCCGGTAAGTATACTGCTTGGGGTA |
| | TAGTTCCACCTATGTTAGTTTTTATGGCTTTGGCCACTTTCTGCCAAATTTTCACTAATACCTG |
| | GTTGTCTTTTTGGACCGAGAACAAATTCTCTGGTAAGGATGATAACTTCTACATCGGTATCTA |
| | CGTTATGTTCACCGTCTTGTCTTTTGTTTTCCTGGCTTTGGAATTCATGTCCTTGGTTTACATGA |
| | CTAATACCGCTGCTGTCAAGTTGAATATTGCTGCTGTTCAAAAGGTTCTGAAGGTTCCTATGG |
| | CTTTTATGGATACAACTCCAATGGGTAGAATCTTGAACAGGTTCACTAAGGATACTGACGTTT |
| | TGGATAACGAAATCGGTGAACAGATTAACTTCGCCTTGTTCATGTTGTCTAACGTTGTTGGTA |
| | TTATCATCTTGTGCATTATCTACTTGCCATGGTTTGCTATTGCTGTCCCATTTTTGGGTTTCATG |
| | TTTATCGCTGTCTCCAACTATTATCAAGCTTCCGCTAGAGAAATCAAGAGATTGGAAGCTGTT |
| | TCTAGGTCCTTTGTCTACAACAACTTTAACGAAGTCTTGAACGGTATCAACACCATTAACGCT |
| | TATAAGGCCGAATCCAGATTTGTTGCTAAGAACGACAGATTGATCAACGGTATGAACGAGTC |
| | TTACTACTTGACCATCGGTAATCAAAGATGGTTGGGTATTCAGATGAACATTATTGCCGTCCT |
| | GTTCTCCTTGTTGATTGCTTTGTTATGCGTGAACAGGGTTTTCAAGATTTCTCCAGCTTCTGTC |
| | GGTCTGTTGTTGTCTTATGTATTTTCTATCGGTGGCACCCTGTCCATGTTGATTAGAACTTTTA |
| | CACAGGTCGAGAACGAGATGAATTCCGTTGAAAGAATCTCCTACTACTCGTTCTCTTTGCCAC |
| | AAGAAGCTCCATCTTACATTACTGAAAATTCTCCACCACCAGAATGGCCAGCTAAAGGTGAA |
| | ATTCATTTCAAGGATACCTCATTGGCTTACAGACCAGGTTTGCCATTGGTTTTGAAGAACTTG |
| | AACTTCTCCATTAAGGGCTCCGAAAAGATTGGTATTTGTGGTAGAACTGGTGCCGGTAAATC |
| | TTCTATTATGACTGCCTTGTACAGGCTGTCTGAATTGGATGGTGGTTCAATTGTCATTGATGA |
| | CATCGATATTTCTACCTTGGGCTTGCATGATTTGAGGTCCAAGTTGTCTATTATCCCACAAGA |
| | TCCAGTCATGTTCAGAGGTACTATTAGGAAAAACTTGGATCCATTCGATCAATCCACCGATGA |
| | TCAATTGTGGGGTGCTTTAGTTAGAACAGGTTTGGTTGAAGCTGATAGATTGGATGTTGTAA |
| | AGGCTCAAGTTAAGGTGCAGAAAGAAGATAAGTCTGATCACGGTGACAACAACAATGGTGC |
| | TGATAAGAAAGGTGCCGAAGAAGGTTCTATCTTGCATAAGTTTCACTTGGATCAAATGGTTG |
| | AGGATGAAGGTGTCAATTTCTCATTGGGTGAAAGACAATTGATTGCCTTTGCTAGAGCCTTG |
| | GTCAGAAATTCCAAGATTTTGATTTTGGACGAAGCCACCTCTTCCGTTGATTACGAAACTGAT |
| | GCTAAGATCCAAAACTCCATCGTTAATGAATTCGCCGATTGCACCATTTTGTGCATTGCTCAT |
| | AGACTGAAAACCATCATCAACTACGATAAGATCCTGGTCTTGGATAAGGGTGAGATCAAAG |
| | AGTTTAATACCCCTTGGAACTTGTTTAAGACCAAGGACTCCATTTTCCAACAGATGTGCATTA |
| | AGTCCAACATCGTTGAAGAGGATTTCCACAGAGTGTCTAAGTTCTGA |
| SEQ ID | MSDYDLEENHLVRQNRLLSSLFSKELPPIPEDDERPEHPERDANFFSKIFFWWMIPVMNTGYKRT |
| NO: 942 | LTPKDLFTLSDDIKVETMAARFMAIFTSDVERAKLKHVKKKCKKRGETLESSSVDFDTDVEDFKVS |
| | PIMFFFTIWKTYKYQYFAASVCLAIANSAQAVNPLLFKKLITYVGLKAYGIEQGVGKGVGYAIGSCL |
| | IEFLGAVLFNHFFYKAMMTGAETKGVLTKALLEKSFRLSAESKHKFPVGKITSMMGTDLSRIDLAL |
| | GLQPFIFVFPIPIVISIAILIVNIGAVALIGIGVMLLFMAVIGGTTAKLYSYRTKANKYTDIRVSYMKEV |
| | LNNLKMIKFYSWEPPYYENISSTRTKEMDIIYNMQTLRSIVTALAMSLTGFASLVAFLVLFAVDND |
| | RKNPASIFSSISLFNVLLTQVFMLPMALATSADAFAGVGRVSTFLTTGEVDPKELETDISADVLQR |
| | MDKEDVVIEVNNASFEWEIFEDIEEKDPKKEKEEKKKAKKAAKETKKLAKQAKNSQTITPSEEELS |
| | KIDSPKFTEKELSTESKSVEEKVFAGLNNINLSIKKNEFVVITGMIGSGKTSLLNALSGFMKKTSGEV |
| | LVSSSLLLCGYPWIQNTTVRENIVFGSEWDEEKYNRVIFACSLESDIEILPGGDLTEIGERGITLSGG |
| | QKARINLARAVYGGREIILMDDVLSAVDARVGKHIMNNCILDLLKDSTRILATHQLSLIDSADRVIF |
| | LNGDGSISVGTNEELQKSNPGFAALMAHNAKTEEDDEDEKIDVDLDKQKFEEHHEVEKELIQRQ |
| | VTRASAVDEEAIRKDYNKNVEEDGHLIEDEDRGVNAIALDVYLTYVKLGSGKYTAWGIVPPMLVF |
| | MALATFCQIFTNTWLSFWTENKFSGKDDNFYIGIYVMFTVLSFVFLALEFMSLVYMTNTAAVKL |
| | NIAAVQKVLKVPMAFMDTTPMGRILNRFTKDTDVLDNEIGEQINFALFMLSNVVGIIILCIIYLPW |
| | FAIAVPFLGFMFIAVSNYYQASAREIKRLEAVSRSFVYNNFNEVLNGINTINAYKAESRFVAKNDRL |
| | INGMNESYYLTIGNQRWLGIQMNIIAVLESLLIALLCVNRVFKISPASVGLLLSYVFSIGGTLSMLIR |
| | TFTQVENEMNSVERISYYSFSLPQEAPSYITENSPPPEWPAKGEIHFKDTSLAYRPGLPLVLKNLNF |
| | SIKGSEKIGICGRTGAGKSSIMTALYRLSELDGGSIVIDDIDISTLGLHDLRSKLSIIPQDPVMFRGTIR |
| | KNLDPFDQSTDDQLWGALVRTGLVEADRLDVVKAQVKVQKEDKSDHGDNNNGADKKGAEEG |
| | SILHKFHLDQMVEDEGVNFSLGERQLIAFARALVRNSKILILDEATSSVDYETDAKIQNSIVNEFAD |
| | CTILCIAHRLKTIINYDKILVLDKGEIKEFNTPWNLFKTKDSIFQQMCIKSNIVEEDFHRVSKF |
| SEQ ID | ATGATGGACCAAAACCACCACTCTGATAAGACTGCTGAAGCTCAACCATCTGAAAAGAGAAA |
| NO: 943 | GACTAGAAACTGCTGTAACGGCTTCAAGATGTTTTTGGCTGCTTTGTCCTTGTCCTTCATTTCT |
| | AAAGCTTTGGGTGCCATCATCATGAAGTCCTCTATTACCCAAATCGAAAGAAGGTTCGACAT |
| | CTCTTCTTCTACCGTTGGTTTGATTGATGGTTCCTTCGAAATTGGTAACTTGCTGGTTATCGTG |
| | TTCGTTTCTTACTTTGGTGCTAAGTTGCATAGGCCAAAGTTGATTGGTATTGGTTGTATCGTT |
| | ATGGGCACCGGTTCTATTTTGACTGCTTTACCACATTTCTTCATGGGCTACTACAGATACTCTA |
| | AGGATACCACTTTTAACCCCTCTGAAAACTCTACTTCTAACTTGCCAACCTGCTCTATTAACCA |
| | GTCTTTGTTGCCAAACAGAACCTCCTTGGAAGTTGTTGAAAAAGGTTGGGAAAAAGACTCCG |
| | GTTCTTATATGTGGATCTACGTTTTGATGGGTAACATGTTGAGAGGTATTGGTGAAACTCCA |
| | ATTGGTCCATTGGGTATCTCTTACATTGATGATTTTGCCGAAGAAGGCCACTCTTCATTATACT |
| | TGGGTAATTTGTTGGCCGTTACCATGATTGGTCCAATTATTGGTTTCGTCTTGGTGTCCCAAT |
| | TCTCCAAGATGTATGTTGATATCGGTTACGTTGACTTGTCCACCATTAGAATTACTCCAAAGG |
| | ATTCTAGATGGGTTGGTGCTTGGTGGTTGGGTTTCTTAGCTGCTGGTTTGATCTCCATTATTA |
| | GCTCTATCCCTTTCTTCTTCCTGCCAAAAACTTTGGACAAACCCAACAAAGAAAAGAAGGCTT |
| | CCGTTTCCTCTATCTCTTTGCCAATGAAGAACGAAGAAAAGTCCCAAATGGCTTCTTTGACTA |
| | AGACTGGTCAAAACGTTACTGATACCATTACCGGTTTCTTGCAGTCCTTGAAATCCATTTTGA |
| | CTAACCCCTTGTACGTCTTGACTTTGTTTTTGACCTTGTTGCAAGCCTCCTCTCATATTGGTTCT |
| | GTTACTTACGTTTTCAAGTACGTCGAACAACAGTACGGTAATTCTGCTTCTGAAACCTCCATTT |
| | TGTTGGGCTTCATTACCATTCCATCATTGGCTGCTGGTATGTTTACAGGTGGTTTTATTGTCAA |
| | GAAGTTCAAGTTCACCTTGGTTGGTATTGCCAAGTTCTCTTTGTGTACCCATTTGATGTCTTTC |
| | TTGTTCCACTTGTTGAACTTCGCTTTGATCTGCGAAAACAAATCTGTTGCAGGTTTGACTTTGA |
| | CCTACGATGGTAATACTCCAGTTGCTTCTCATGTTAACGTTCCATTGTCTTACTGTAACTCTGA |
| | TTGCAACTGTGATCCAACTCAATGGGAACCATTGTGTGGTTCAAATGGTATTACTTACATCTC |
| | TCCATGTTTGGCTGGTTGTACATCTTCTACTGGTTCTAAGAAGTCCATCGTTTTCCATAACTGT |
| | TCTTGCGTTGAAGAAAACGGTTTCCAGTCTAAGAACAACTCTATGAAGTTGGGTGAATGCCC |
| | AAAATCTGATGATTGCAGAAGAAAGTTCTACATCTACATCGTCGTTCAGATCTTGACCTTATT |
| | TTCTGCTGCTTTGGGTTCCACCTCTAACATTATGTTGATCTTCAAGAACGTGGAACCCGAGTT |
| | GAAATCTTTGGCTATGGGTTTTCATTCCTTGACCATCAGAACTTTAGGTGGTATTCCAGCTCC |
| | AATCTATTTCGGTGCTTTAATTGATAGAGCTTGCATGAAGTGGTCGATCAACAATTATGGTAA |
| | GCAAGGTTCTTGCAGGATCTACAACTCTTTGTTGTATGGTCATACTTTCTTCGGTTTGACTACC |
| | GGTTTGAAATTTCCAGCTTTGGTTTTGTTCGTCGTTTTGATTTTCGCTATGAAGAAGAAGTAC |
| | CAAGGCAAGGATATTAAGGCCTCAGAAAACGAAACTAAGGCTGTTAATGAAGCTAACTCCG |
| | GCTTGTTGATTAACGATGCTAAAGTTGATCACGAAACCCACATCTGA |
| SEQ ID | MMDQNHHSDKTAEAQPSEKRKTRNCCNGFKMFLAALSLSFISKALGAIIMKSSITQIERRFDISSS |
| NO: 944 | TVGLIDGSFEIGNLLVIVFVSYFGAKLHRPKLIGIGCIVMGTGSILTALPHFFMGYYRYSKDTTFNPS |
| | ENSTSNLPTCSINQSLLPNRTSLEVVEKGWEKDSGSYMWIYVLMGNMLRGIGETPIGPLGISYID |
| | DFAEEGHSSLYLGNLLAVTMIGPIIGFVLVSQFSKMYVDIGYVDLSTIRITPKDSRWVGAWWLGFL |
| | AAGLISIISSIPFFFLPKTLDKPNKEKKASVSSISLPMKNEEKSQMASLTKTGQNVTDTITGFLQSLKS |
| | ILTNPLYVLTLFLTLLQASSHIGSVTYVFKYVEQQYGNSASETSILLGFITIPSLAAGMFTGGFIVKKFK |
| | FTLVGIAKFSLCTHLMSFLFHLLNFALICENKSVAGLTLTYDGNTPVASHVNVPLSYCNSDCNCDPT |
| | QWEPLCGSNGITYISPCLAGCTSSTGSKKSIVFHNCSCVEENGFQSKNNSMKLGECPKSDDCRRK |
| | FYIYIVVQILTLFSAALGSTSNIMLIFKNVEPELKSLAMGFHSLTIRTLGGIPAPIYFGALIDRACMKW |
| | SINNYGKQGSCRIYNSLLYGHTFFGLTTGLKFPALVLFVVLIFAMKKKYQGKDIKASENETKAVNEA |
| | NSGLLINDAKVDHETHI |
| SEQ ID | ATGCAACCAGTTTACCCAGAGGTTAAGCCAAATCCATTGAGAAATGCTAACTTGTGCTCCAG |
| NO: 945 | AGTTTTCTTTTGGTGGTTGAATCCTTTGTTCAAGATCGGTCATAAGAGAAGATTGGAAGAGG |
| | ATGATATGTACTCCGTTTTGCCAGAAGATAGATCTCAACATTTGGGTGAAGAATTGCAAGGT |
| | TACTGGGATCAAGAAGTTTTGAAGGCTGAAAAGGATGCTAGAGAACCATCTTTGACTAAGG |
| | CCATTATTAAGTGCTACTGGAAGTCCTATGTTGTCTTGGGTATTTTCACCTTGATCGAAGAAT |
| | CTACCAGAGTTGTTCAGCCAATTATCTTGGGTAAGATCATCGGTTACTTCGAAAACTACGATC |
| | CATCTGATTCTGCTGCATTATATGAAGCTCATGGTTATGCTGGTGTTTTGTCTGCTTGTACTTT |
| | GGTTTTGGCTATCTTGCATCACTTGTACTTCTACCATGTTCAATGTGCTGGTATGAGATTGAG |
| | AGTTGCTATGTGTCATATGATCTACAGAAAGGCCTTGAGGTTGTCTAATTCTGCTATGGGTAA |
| | AACTACTACCGGTCAAATCGTTAACTTGTTGTCCAACGATGTTAACAAGTTCGACCAAGTTAC |
| | CATCTTCTTGCATTTCTTGTGGGCTGGTCCATTGCAAGCTATAGTTGTTACTGCTTTGTTGTGG |
| | ATGGAAATCGGTATTTCTTGTTTAGCTGGTATGGCCGTTTTGATCATTTTGTTGCCATTGCAAT |
| | CTTGTATCGGCAAGTTGTTCTCTTCATTGAGATCAAAGACTGCTGCTTTCACCGACACTAGAA |
| | TTAGAACTATGAACGAAGTTATCACCGGCATCAGAATCATTAAGATGTACGCTTGGGAAAAG |
| | TCCTTCGCTGATTTGATTACCAACCTGAGAAGAAAAGAGATCTCGAAGATTCTGAGGTCCTCT |
| | TATTTGAGAGGTATGAACTTGGCTTCTTTCTTCGTTGCCTCCAAAATCATCGTTTTCGTTACTT |
| | TCACTACCTACGTCTTGTTGGGTAACGTTATTACTGCTTCTAGAGTTTTCGTTGCCGTTTCATT |
| | ATATGGTGCTGTTAGATTGACTGTCACCTTGTTTTTCCCATCTGCTGTTGAAAAAGTTTCCGAA |
| | GCCTTCGTTTCCATCAGAAGAATCAAGAACTTTCTGTTGTTGGACGAAATCACCCAATTGCAT |
| | TCTCAATTGCCATCTGATGGTAAGATGATCGTTAACGTTGAAGATTTCACTGCTTTCTGGGAC |
| | AAAGCTTCTGATACTCCAACTTTACAAGGTTTGTCTTTCACTGTTAGACCAGGTGAATTATTG |
| | GCAGTTGTTGGTCCAGTTGGTGCTGGTAAATCTTCTTTGTTGTCTGCTGTTTTAGGTGAGTTG |
| | CCACCATCTCAAGGTCAAGTTTCTGTTCACGGTAGAATTGCTTACGTTTCTCAACAACCATGG |
| | GTTTTCTCTGGTACAGTGAGATCCAATATTTTGTTCGGTAAGAAGTACGAGAAAGAGAGGTA |
| | CGAAAAGGTTATTAAGGCTTGCGCTTTGAAAAAGGACTTGCAGTTATTGGAAGATGGCGACT |
| | TGACTATGATTGGTGATAGAGGTACTACTTTGTCTGGTGGTCAAAAGGCTAGAGTTAATTTG |
| | GCTAGAGCTGTTTATCAAGATGCCGACATCTATTTGTTGGATGATCCATTGTCAGCTGTTGAT |
| | GCTGAAGTTTCTAGACACTTGTTCGAATTGTGTATTTGTCAAGCCTTGCACGAAAAGATCAGA |
| | ATTTTGGTTACCCACCAACTGCAATACTTGAAAGCTGCTTCCCAAATCTTGATCTTGAAAGAC |
| | GGTAAAATGGTTCAAAAGGGTACTTACACCGAGTTCTTGAAGTCTGGTATTGATTTCGGTTC |
| | CCTGTTGAAGAAAGAGAACGAAGAAGCTGAACCATCTCCAGTTCCAGGTACTCCAACATTAA |
| | GAAATAGAACCTTCTCCGAATCCTCCGTTTGGTCACAACAATCTTCTAGACCATCATTGAAAG |
| | AAGCTACTCCAGAAGGTCCAGATACCGAAAACATTCAAGTTACTTTGACCGAAGAAACCAGG |
| | TCTGAAGGTAAGGTTGGTTTTAAAGCTTACAAGAACTACTTCACTGCTGGTGCTCATTGGTTC |
| | ATCATCATCTTTTTGATCTTGGTTAACTTGGCTGCTCAAGTTGCTTATGTATTGCAAGACTGGT |
| | GGTTGTCTTATTGGGCTAATCAACAATCTGCTTTGAACGTTACTGTTAACGGTCAAGGTAATG |
| | TCACCGAAAAGTTGAATTTGAACTGGTACTTGGGTATCTACTCTGGTTTGACAGCTTCTACTG |
| | TTTTGTTTGGTATTGCCAGATCCTTGTTGGTTTTCTTCGTCTTGGTTTCCTCTTCTCAAACCTTG |
| | CACAATCAGATGTTCGAATCTATTTTGAGAGCCCCAGTTTTGTTCTTCGATAGAAATCCAATT |
| | GGCCGTATCCTGAACAGATTCTCTAAAGATATTGGTCACATGGACGACTTGTTGCCTTTGACT |
| | TTCTTGGATTTCATCCAGACATTCTTGCAAGTTATCGGTGTTGTTGGTGTTGCAGTTGCTGTTA |
| | TTCCATGGATTGCTATTCCATTGGTTCCTTTGGGTATCGTGTTTTTCGTATTGAGAAGGTACTT |
| | CTTGGAAACCTCCAGAGATGTTAAGAGATTGGAATCTACTACTAGGTCCCCAGTGTTTTCTCA |
| | TTTGTCATCTTCATTGCAAGGATTGTGGACCATTAGAGCTTACAAAGCCGAACAAAGATTCCA |
| | AGAGTTGTTTGATTCTCACCAAGACTTGCATTCTGAAGCCTGGTTTTTGTTTTTGACTACCTCT |
| | AGATGGTTCGCCGTTAGATTGGATGCTATTTGTGCTGTTTTTGTTATCGTTGTCGCTTTCGGTT |
| | CATTGATTTTGGCTAAAACTTTGGATGCTGGTCAAGTTGGTTTGGCTTTGTCTTATGCTTTAAC |
| | CTTGATGGGTATGTTCCAATGGTGTGTTAGGCAATCAGCTGAAGTTGAAAACATGATGATCT |
| | CCGTTGAAAGAGTTATCGAGTACACCGACTTGGAAAAAGAAGCTCCTTGGGAATCTCAGAA |
| | AAGACCATTGCCATCATGGCCACATGAAGGTGTTATTATCTTCGATAACGTCAACTTCTCCTA |
| | CTCTTTGGATGGTCCTTTAGTCTTGAAACATTTGACCGCCTTGATTAAGTCTAGAGAAAAGGT |
| | TGGTATCGTTGGTAGAACTGGTGCAGGTAAGTCATCTTTAATTGCTGCCTTGTTCAGATTGTC |
| | TGAACCAGAAGGTAAAATCTGGATCGATAAGATCTTGACTACCGAAATTGGCTTGCACGATT |
| | TGAGAAAGAAGATGTCCATTATTCCACAAGAGCCAGTGTTGTTTACAGGTACTATGAGGAAA |
| | AACTTGGACCCATTCTCTGAACACTCCGATGAAGAATTATGGAACGCTTTGGAAGAAGTGCA |
| | ATTGAAAGAGGCCATAGAAGATTTGCCTGGCAAAATGGATACTGAATTAGCTGAATCTGGCT |
| | CCAATTTCTCTGTTGGTCAAAGACAATTGGTTTGTTTGGCCAGAGCTATCTTGAGGAAGAAC |
| | AGGATTTTGATTATTGATGAAGCTACCGCCAACGTTGATCCAAGAACTGATGAATTGATCCA |
| | AAAGAAGATCAGGGAAAAGTTCGCTCATTGCACTGTTTTGACTATTGCCCATAGATTGAACA |
| | CCATCATCGATTCCGACAAGATCATGGTTTTGGATTCCGGTAGGTTGAAAGAATACGATGAA |
| | CCATATGTCTTGTTGCAGAACAGAGACTCTTTGTTCTACAAGATGGTACAGCAATTAGGTAAA |
| | GCTGAAGCTGCCGCTTTGACTGAAACTGCAAAACAAGTTTACTTCAAGAGGAACTACCCAGA |
| | TATTACCCATAACGGTCATGTTGTTATGAATGCCTCTTCTGGTCAACCATCTGCCTTGACTATT |
| | TTTGAAACTGCCTTGTAA |
| SEQ ID | MQPVYPEVKPNPLRNANLCSRVFFWWLNPLFKIGHKRRLEEDDMYSVLPEDRSQHLGEELQGY |
| NO: 946 | WDQEVLKAEKDAREPSLTKAIIKCYWKSYVVLGIFTLIEESTRVVQPIILGKIIGYFENYDPSDSAALY |
| | EAHGYAGVLSACTLVLAILHHLYFYHVQCAGMRLRVAMCHMIYRKALRLSNSAMGKTTTGQIV |
| | NLLSNDVNKFDQVTIFLHFLWAGPLQAIVVTALLWMEIGISCLAGMAVLIILLPLQSCIGKLFSSLR |
| | SKTAAFTDTRIRTMNEVITGIRIIKMYAWEKSFADLITNLRRKEISKILRSSYLRGMNLASFFVASKII |
| | VFVTFTTYVLLGNVITASRVFVAVSLYGAVRLTVTLFFPSAVEKVSEAFVSIRRIKNFLLLDEITQLHS |
| | QLPSDGKMIVNVEDFTAFWDKASDTPTLQGLSFTVRPGELLAVVGPVGAGKSSLLSAVLGELPPS |
| | QGQVSVHGRIAYVSQQPWVFSGTVRSNILFGKKYEKERYEKVIKACALKKDLQLLEDGDLTMIGD |
| | RGTTLSGGQKARVNLARAVYQDADIYLLDDPLSAVDAEVSRHLFELCICQALHEKIRILVTHQLQY |
| | LKAASQILILKDGKMVQKGTYTEFLKSGIDFGSLLKKENEEAEPSPVPGTPTLRNRTFSESSVWSQ |
| | QSSRPSLKEATPEGPDTENIQVTLTEETRSEGKVGFKAYKNYFTAGAHWFIIIFLILVNLAAQVAYV |
| | LQDWWLSYWANQQSALNVTVNGQGNVTEKLNLNWYLGIYSGLTASTVLFGIARSLLVFFVLVSS |
| | SQTLHNQMFESILRAPVLFFDRNPIGRILNRFSKDIGHMDDLLPLTFLDFIQTFLQVIGVVGVAVA |
| | VIPWIAIPLVPLGIVFFVLRRYFLETSRDVKRLESTTRSPVFSHLSSSLQGLWTIRAYKAEQRFQELFD |
| | SHQDLHSEAWFLFLTTSRWFAVRLDAICAVFVIVVAFGSLILAKTLDAGQVGLALSYALTLMGMF |
| | QWCVRQSAEVENMMISVERVIEYTDLEKEAPWESQKRPLPSWPHEGVIIFDNVNFSYSLDGPLV |
| | LKHLTALIKSREKVGIVGRTGAGKSSLIAALFRLSEPEGKIWIDKILTTEIGLHDLRKKMSIIPQEPVLF |
| | TGTMRKNLDPFSEHSDEELWNALEEVQLKEAIEDLPGKMDTELAESGSNFSVGQRQLVCLARAIL |
| | RKNRILIIDEATANVDPRTDELIQKKIREKFAHCTVLTIAHRLNTIIDSDKIMVLDSGRLKEYDEPYVL |
| | LQNRDSLFYKMVQQLGKAEAAALTETAKQVYFKRNYPDITHNGHVVMNASSGQPSALTIFETAL |
| SEQ ID | ATGGACACCTCCTCTAAAGAAAACGCTCATTTGTTCCATAAGAACTCTGCTCAACCTGCTGGT |
| NO: 947 | GGTCCATCTTTTACTGTTGGTTATCCATCTACTGAAGAGGCTAGACCATGTTGTGGTAAATTG |
| | AAAGTTTTCTTGGGTGCCTTGTCCTTCGTTTACTTTGCTAAAGCTTTGGCTGAAGGCTACTTGA |
| | AGTCTACTGTTACTCAAATCGAAAGGCGTTTCGAAATCCCATCTTCTTTGGTTGGTATTATCG |
| | ACGGTTCTTTCGAGATTGGTAACTTGTTGGTCATTACCTTCGTTTCTTACTTCGGTGCTAAATT |
| | GCATAGGCCAAAGATTATTGGTGCTGGTTGTTTGGTTATGGGTTTCGGTACTATGTTGATTGC |
| | TGTTCCACAATTCTTCATGGAAAAGTACTCCTACGAAAAGTACGAAAGGTACTCTCCATCTTC |
| | TAACGTTACCCCATCTATTTCACCTTGCTACTTGGAATCTTCTTCTCCATCTCCATCATCTATTTT |
| | GGGCAAGTCCCAAAACAAGATCTCTCATGAATGTGTTGGTGACTCCTCTTCTTCTATGTGGGT |
| | TTATGTCTTTCTGGGCAATTTGTTGAGAGGTTTGGGTGAAACTCCAATTCAACCATTGGGTAT |
| | TGCTTACTTGGATGATTTCGCTTCTGAAGATAATGCCGCTTTCTACATTGGTTGTGTTCAAACC |
| | GTTGCTATTATCGGTCCAATTTTCGGTTTCTTGTTGGGTTCTTTGTGTGCCAAGTTGTACGTTG |
| | ATATTGGTTTCGTTAACTTGGACCACATTACTATCACTCCAAAAGATCCACAATGGGTTGGTG |
| | CTTGGTGGCTAGGTTACTTAATTGCTGGTTTCTTATCTTTGTTGGCTGCCGTTCCATTTTGGTG |
| | TTTGCCAAAAACTTTGCCAAGATCTCAGTCCAGAGAAAACTCTGGTTCTACTTCTGAAAAGTC |
| | CAAGTTCATTGATGACCCAATCCATTATCAAATGGCTCCAGGTGATGATAAGATGAAGATTA |
| | TGGAAATGGCCAAGGACTTCCTGCCATCTTTGAAAACTTTGTTTAGAAACCCCGTCTACATCT |
| | TGTACTTGTGTGCTTCTACTGTGCAGTTCAATTCTTTGTTCGGTATGGTTACTTACAAGCCCAA |
| | GTACATCGAACAACAATACGGTCAATCATCCTCTAAGGCCAATTTCGTTATTGGCTTGATTAA |
| | CATTCCAGCTGTTGCCTTGGGTATTTTTAGTGGTGGTATAGTCATGAAGAAGTTCAGATTGG |
| | GTATCTGTGAAGCCACTAAGTTGTATTTGGGTTCCTCTGTTTTTGGCTACCTGTTGTTTTTGTC |
| | TTTGTTTGCTTTGGGTTGCGAGAACTCTTCTGTTGCAGGTTTGACTGTTTCTTACCAAGGTAC |
| | AAAACCAGTCTCTTATCACGAAAGAGCTTTGTTCTCTGATTGCAACTCTAGATGTAAGTGCTC |
| | TGATTCTAAATGGGAACCTATGTGTGGTGATAACGGTATCACTTATGTTTCTGCTTGTTTGGC |
| | TGGTTGCCAATCATCTTCTAGATCTGGTAAGAACATCATCTTCAGCAACTGTACCTGTGTTGG |
| | TTTTGCTGCTCCAAAATCTGGTAATTGGTCTGGTATGATGGGTAGATGTCAAAAGGATAACG |
| | GTTGCTCTCAAATGTTCCTGTACTTCTTGGTTATCTCTGTCATCACTTCTTACACCTTGTCTTTA |
| | GGTGGTATTCCAGGCTACATTTTGTTGTTGAGATGTATCCAACCACAGTTGAAGTCTTTCGCT |
| | TTAGGTATCTATACCTTGGCCGTTAGAGTTTTGGCAGGTATTCCTGCTCCAGTTTATTTCGGT |
| | GTTTTGATTGATACCTCTTGCTTGAAGTGGGGTTTTAAGAAATGTGGTTCTAGAGGTTCTTGC |
| | AGGTTGTATGATTCTCATGCTTTCAGACATATCTACTTGGGTTTGACTACTTTGTTGGGTACTG |
| | TCTCTGTTTTCTTGTCTATGGCTGTTTTGTTCGTCCTGAAGAAGAAGTACGTTTCTAAGCACTC |
| | TTCATTGATTACCACCAGGGAAAAGATTGGCATGTCCTCTAGTATTAAGAAAGAAACCTGTG |
| | CTGCTAGAGACAGAGGTTTACAACCTAAATATTGGCCAGGTAAAGAAACCCGTTTGTGA |
| SEQ ID | MDTSSKENAHLFHKNSAQPAGGPSFTVGYPSTEEARPCCGKLKVFLGALSFVYFAKALAEGYLKS |
| NO: 948 | TVTQIERRFEIPSSLVGIIDGSFEIGNLLVITFVSYFGAKLHRPKIIGAGCLVMGFGTMLIAVPQFFM |
| | EKYSYEKYERYSPSSNVTPSISPCYLESSSPSPSSILGKSQNKISHECVGDSSSSMWVYVFLGNLLRG |
| | LGETPIQPLGIAYLDDFASEDNAAFYIGCVQTVAIIGPIFGFLLGSLCAKLYVDIGFVNLDHITITPKD |
| | PQWVGAWWLGYLIAGFLSLLAAVPFWCLPKTLPRSQSRENSGSTSEKSKFIDDPIHYQMAPGDD |
| | KMKIMEMAKDFLPSLKTLFRNPVYILYLCASTVQFNSLFGMVTYKPKYIEQQYGQSSSKANFVIGL |
| | INIPAVALGIFSGGIVMKKFRLGICEATKLYLGSSVFGYLLFLSLFALGCENSSVAGLTVSYQGTKPVS |
| | YHERALFSDCNSRCKCSDSKWEPMCGDNGITYVSACLAGCQSSSRSGKNIIFSNCTCVGFAAPKS |
| | GNWSGMMGRCQKDNGCSQMFLYFLVISVITSYTLSLGGIPGYILLLRCIQPQLKSFALGIYTLAVR |
| | VLAGIPAPVYFGVLIDTSCLKWGFKKCGSRGSCRLYDSHAFRHIYLGLTTLLGTVSVFLSMAVLFVL |
| | KKKYVSKHSSLITTREKIGMSSSIKKETCAARDRGLQPKYWPGKETRL |
| SEQ ID | ATGGACCAAAACCAGCACTTGAACAAAACTGCTGAAGCTCAACCATCCGAAAACAAAAAGA |
| NO: 949 | CTAGATACTGCAACGGCCTGAAGATGTTTTTGGCTGCTTTGTCCTTGTCTTTCATTGCTAAAAC |
| | TTTGGGTGCCATCATCATGAAGTCCTCCATTATTCATATCGAGAGAAGGTTCGAGATCTCCTC |
| | TTCTTTGGTTGGTTTTATCGATGGTTCCTTCGAAATCGGTAACTTGTTGGTTATCGTGTTCGTT |
| | TCTTACTTCGGTTCCAAATTGCATAGGCCAAAGTTGATTGGTATTGGTTGCTTCATTATGGGT |
| | ATCGGTGGTGTTTTGACTGCTTTACCACATTTCTTTATGGGCTACTACAGGTACTCCAAAGAG |
| | ACTAATATCGACTCCTCTGAAAACTCTACTTCTACCTTGTCTACCTGCTTGATTAACCAGATCT |
| | TGTCTTTGAATAGAGCCTCTCCAGAAATCGTTGGTAAGGGTTGTTTGAAAGAATCCGGTTCTT |
| | ATATGTGGATCTACGTGTTTATGGGTAACATGTTGAGAGGTATTGGTGAAACTCCAATAGTT |
| | CCATTGGGTTTGTCCTACATTGATGACTTTGCTAAAGAAGGCCACTCCTCATTATACTTGGGT |
| | ATTTTGAATGCCATTGCCATGATCGGTCCAATTATTGGTTTTACCTTGGGCTCTTTGTTCTCCA |
| | AGATGTACGTTGATATTGGTTACGTCGATTTGTCCACCATTAGAATTACTCCAACTGATTCTA |
| | GATGGGTTGGTGCTTGGTGGTTGAATTTCTTGGTTTCTGGTTTGTTCAGCATCATCTCCTCTAT |
| | TCCTTTCTTCTTCTTGCCACAAACTCCAAACAAGCCACAAAAAGAAAGAAAGGCCTCTTTGTC |
| | ATTGCACGTCTTGGAAACTAATGACGAAAAGGATCAAACTGCCAACTTGACCAATCAAGGTA |
| | AGAACATTACTAAGAACGTCACCGGTTTCTTCCAGTCCTTTAAGTCTATTTTGACTAACCCCTT |
| | GTACGTCATGTTCGTTTTGTTGACTTTGTTGCAGGTCAGCTCTTACATTGGTGCTTTTACTTAC |
| | GTTTTCAAGTACGTCGAACAACAATACGGTCAACCATCTTCTAAGGCCAATATTTTGTTGGGT |
| | GTTATCACGATTCCAATCTTCGCTTCTGGTATGTTTTTAGGTGGTTACATTATCAAGAAGTTCA |
| | AGTTGAACACCGTTGGTATTGCTAAGTTCTCTTGTTTCACTGCCGTTATGTCACTGTCTTTCTA |
| | CTTGTTGTACTTCTTCATCTTGTGCGAGAACAAATCTGTTGCTGGTTTGACTATGACTTACGAT |
| | GGTAACAATCCAGTTACCTCTCATAGAGATGTTCCATTGTCTTACTGTAACTCCGATTGCAAC |
| | TGTGATGAATCTCAATGGGAACCAGTTTGTGGTAACAACGGTATTACTTACATTTCTCCATGT |
| | TTGGCCGGTTGCAAATCTTCTTCAGGTAACAAAAAGCCCATCGTGTTCTACAACTGTTCTTGC |
| | TTGGAAGTTACCGGTCTGCAAAACAGAAATTACTCTGCTCATTTGGGTGAATGCCCAAGAGA |
| | TGACGCTTGTACTAGAAAGTTTTACTTCTTCGTCGCCATCCAAGTCTTGAACTTGTTTTTCTCA |
| | GCACTAGGTGGTACTTCCCATGTTATGTTGATTGTCAAAATCGTCCAGCCAGAGTTGAAATCT |
| | TTGGCTTTGGGTTTTCACTCCATGGTTATTAGAGCCTTAGGTGGTATTTTGGCTCCAATCTATT |
| | TTGGTGCCTTGATTGATACCACCTGTATTAAGTGGTCTACCAACAACTGTGGTACTAGAGGTT |
| | CTTGTAGAACCTACAATTCTACCTCATTCTCCAGAGTCTACTTGGGTTTATCTTCTATGTTGAG |
| | GGTTTCCTCTTTGGTCTTGTACATCATTTTGATCTACGCCATGAAGAAAAAGTACCAAGAGAA |
| | GGATATTAACGCCTCCGAAAATGGTTCTGTTATGGATGAAGCTAACTTGGAGTCTCTGAACA |
| | AGAACAAACATTTCGTTCCATCTGCTGGTGCTGATTCTGAAACTCACTGTTAA |
| SEQ ID | MDQNQHLNKTAEAQPSENKKTRYCNGLKMFLAALSLSFIAKTLGAIIMKSSIIHIERRFEISSSLVGF |
| NO: 950 | IDGSFEIGNLLVIVFVSYFGSKLHRPKLIGIGCFIMGIGGVLTALPHFFMGYYRYSKETNIDSSENSTS |
| | TLSTCLINQILSLNRASPEIVGKGCLKESGSYMWIYVFMGNMLRGIGETPIVPLGLSYIDDFAKEGH |
| | SSLYLGILNAIAMIGPIIGFTLGSLFSKMYVDIGYVDLSTIRITPTDSRWVGAWWLNFLVSGLFSIISS |
| | IPFFFLPQTPNKPQKERKASLSLHVLETNDEKDQTANLTNQGKNITKNVTGFFQSFKSILTNPLYV |
| | MFVLLTLLQVSSYIGAFTYVFKYVEQQYGQPSSKANILLGVITIPIFASGMFLGGYIIKKFKLNTVGIA |
| | KFSCFTAVMSLSFYLLYFFILCENKSVAGLTMTYDGNNPVTSHRDVPLSYCNSDCNCDESQWEPV |
| | CGNNGITYISPCLAGCKSSSGNKKPIVFYNCSCLEVTGLQNRNYSAHLGECPRDDACTRKFYFFVAI |
| | QVLNLFFSALGGTSHVMLIVKIVQPELKSLALGFHSMVIRALGGILAPIYFGALIDTTCIKWSTNNC |
| | GTRGSCRTYNSTSFSRVYLGLSSMLRVSSLVLYIILIYAMKKKYQEKDINASENGSVMDEANLESLN |
| | KNKHFVPSAGADSETHC |
| SEQ ID | ATGTTGGAGAAGTTCTGCAACTCTACCTTCTGGAATTCTTCATTCTTGGATTCACCTGAAGCT |
| NO: 951 | GATTTGCCATTGTGTTTCGAACAAACTGTTTTGGTTTGGATCCCATTGGGTTTCTTGTGGTTGT |
| | TGGCTCCATGGCAATTATTGCATGTTTACAAGTCCAGGACCAAGAGATCTTCTACTACTAAGT |
| | TGTACTTGGCTAAGCAAGTTTTCGTTGGCTTCTTGTTGATTTTGGCTGCTATTGAATTGGCCTT |
| | GGTTTTGACTGAAGATTCTGGTCAAGCTACTGTTCCAGCTGTTAGATATACAAACCCATCCTT |
| | GTACTTAGGCACCTGGTTGTTAGTTTTGTTGATCCAATATTCCAGACAATGGTGCGTCCAAAA |
| | GAACTCTTGGTTTTTGTCTTTGTTCTGGATCCTGTCTATTTTGTGCGGTACTTTCCAATTCCAA |
| | ACCTTGATTAGAACCTTGTTGCAAGGTGACAATTCCAACTTGGCTTACTCTTGCTTGTTCTTCA |
| | TTTCCTACGGTTTCCAGATCCTGATCTTGATTTTCTCTGCTTTCTCCGAGAACAACGAGTCATC |
| | TAACAATCCATCTTCCATTGCCTCATTCTTGTCCTCTATTACCTATTCCTGGTACGACTCCATTA |
| | TCTTGAAGGGTTACAAAAGACCATTGACCTTGGAAGATGTTTGGGAAGTTGATGAAGAGAT |
| | GAAGACTAAGACCCTGGTTTCTAAGTTCGAAACCCATATGAAGAGAGAATTGCAAAAAGCTA |
| | GAAGGGCATTGCAAAGAAGGCAAGAAAAATCCTCTCAGCAAAATTCTGGTGCTAGATTGCC |
| | AGGTTTGAACAAGAATCAATCCCAATCTCAAGATGCCCTGGTTTTAGAAGATGTCGAAAAGA |
| | AAAAGAAGAAGTCCGGTACTAAGAAGGATGTTCCAAAATCCTGGTTAATGAAGGCTTTGTTC |
| | AAGACCTTCTACATGGTCTTGTTGAAGTCCTTCCTGTTGAAATTGGTCAACGATATCTTCACCT |
| | TTGTCTCTCCACAACTGTTGAAGTTGTTGATCTCTTTCGCTTCTGATAGAGATACCTACTTGTG |
| | GATTGGTTACTTGTGCGCTATTTTGTTGTTTACCGCTGCCTTGATTCAATCCTTTTGCTTGCAA |
| | TGTTACTTCCAGTTGTGTTTCAAGTTGGGTGTTAAGGTTAGAACCGCTATTATGGCTTCCGTT |
| | TACAAAAAGGCTTTGACCTTGTCTAACTTGGCCAGAAAAGAGTATACAGTTGGCGAAACTGT |
| | TAACTTGATGTCCGTTGATGCTCAAAAGTTGATGGATGTTACCAACTTCATGCACATGTTGTG |
| | GTCCTCTGTTTTACAAATCGTCCTGTCGATATTCTTCTTGTGGCGTGAATTGGGTCCATCAGTT |
| | TTGGCTGGTGTTGGTGTTATGGTTTTGGTTATTCCAATCAACGCCATCTTGTCTACTAAGTCCA |
| | AAACTATCCAAGTCAAGAACATGAAGAACAAAGATAAGAGGCTGAAGATCATGAACGAGAT |
| | CTTGTCTGGTATCAAGATCTTAAAGTACTTCGCTTGGGAACCATCCTTCAGAGATCAAGTTCA |
| | AAACCTGAGGAAGAAAGAGCTGAAAAACTTGTTGGCTTTCTCCCAATTGCAATGCGTTGTTA |
| | TCTTCGTTTTCCAATTGACCCCAGTCTTGGTTTCTGTTGTTACTTTCTCTGTTTACGTCTTGGTC |
| | GACTCCAACAACATTTTGGATGCACAAAAAGCTTTCACGTCCATCACCTTGTTCAATATTTTGA |
| | GGTTCCCCTTGTCTATGCTGCCAATGATGATTTCTTCTATGTTGCAAGCTTCTGTCTCCACTGA |
| | AAGACTGGAAAAGTACTTAGGTGGTGATGATTTGGATACCTCCGCTATTAGACATGATTGCA |
| | ATTTCGATAAGGCCATGCAATTTTCCGAAGCTTCTTTTACTTGGGAACATGATTCTGAAGCTA |
| | CCGTTAGAGATGTCAACTTGGATATTATGGCCGGTCAATTAGTTGCTGTTATTGGTCCAGTTG |
| | GTTCCGGTAAATCTTCTTTGATTTCAGCTATGTTGGGCGAGATGGAAAATGTTCATGGTCATA |
| | TTACCATCAAGGGTACTACTGCTTATGTCCCACAACAATCCTGGATTCAAAACGGTACTATCA |
| | AGGACAATATCTTGTTCGGTACTGAGTTCAACGAAAAGAGATACCAACAAGTCTTGGAAGCT |
| | TGTGCTTTGTTGCCAGATTTGGAAATGTTGCCTGGTGGTGACTTGGCAGAAATTGGTGAAAA |
| | AGGTATCAATTTGTCCGGTGGTCAAAAGCAAAGAATCTCTTTGGCTAGAGCTACCTACCAAA |
| | ATTTGGACATCTACTTGTTGGATGATCCATTGTCAGCTGTTGATGCCCATGTTGGTAAACACA |
| | TCTTTAACAAAGTTTTGGGTCCAAACGGTTTGTTGAAAGGTAAAACTAGGTTGTTGGTTACCC |
| | ACTCCATGCATTTCTTGCCACAAGTTGACGAAATCGTTGTTTTAGGTAACGGTACAATCGTCG |
| | AAAAGGGTTCTTATTCTGCTTTATTGGCTAAGAAGGGTGAATTCGCCAAGAACTTGAAAACC |
| | TTCTTGAGACATACTGGTCCAGAAGAAGAGGCTACAGTTCACGATGGTTCTGAAGAGGAAG |
| | ATGACGATTACGGTTTGATCTCATCCGTTGAAGAAATACCAGAAGATGCTGCTTCTATCACCA |
| | TGAGAAGAGAAAACTCATTCAGAAGGACCCTGTCTAGATCCTCTAGATCTAATGGTAGACAC |
| | TTGAAGTCTCTGAGGAACTCTTTGAAAACCAGAAACGTCAACTCCTTGAAAGAGGATGAAGA |
| | GTTGGTTAAGGGTCAGAAGTTAATCAAGAAAGAGTTCATCGAAACCGGCAAGGTTAAGTTC |
| | TCTATCTACTTGGAATACTTGCAAGCCATCGGTTTGTTCTCCATCTTTTTCATTATTCTGGCCTT |
| | CGTCATGAACTCCGTTGCTTTCATTGGTTCTAACTTGTGGTTATCTGCTTGGACCTCTGATTCC |
| | AAGATTTTCAACTCTACTGATTACCCAGCCTCTCAAAGGGATATGAGAGTTGGTGTTTACGGT |
| | GCTTTGGGTTTAGCTCAAGGTATTTTCGTTTTCATTGCCCATTTTTGGTCTGCCTTTGGTTTTGT |
| | TCATGCCTCTAATATCTTGCACAAGCAGTTGTTGAACAACATATTGAGAGCACCAATGAGGTT |
| | CTTTGATACAACTCCAACTGGTAGAATCGTCAATAGATTCGCTGGTGATATTTCCACTGTTGA |
| | TGATACTTTGCCACAGTCTTTGAGATCTTGGATCACTTGTTTCTTGGGTATCATCTCTACCTTG |
| | GTTATGATCTGTATGGCTACTCCAGTTTTCACCATTATCGTTATTCCATTGGGCATCATCTACG |
| | TGTCTGTTCAAATGTTCTACGTTTCCACCTCTAGACAGTTGAGAAGATTGGATTCTGTTACCA |
| | GATCTCCAATCTACTCCCATTTCTCTGAAACTGTATCTGGTTTGCCAGTTATTAGAGCCTTCGA |
| | ACATCAACAGAGATTCCTAAAGCACAACGAAGTTAGAATCGATACCAATCAGAAGTGCGTCT |
| | TTTCCTGGATTACTTCTAATAGATGGTTGGCCATCAGATTGGAGTTGGTTGGTAATTTGACTG |
| | TTTTCTTCTCCGCTTTGATGATGGTTATCTACAGAGATACTTTGTCTGGTGATACCGTTGGTTT |
| | CGTTTTGTCTAACGCTTTGAACATCACCCAAACTTTGAACTGGTTGGTTAGAATGACCTCCGA |
| | AATCGAAACTAACATCGTTGCCGTTGAAAGAATTACTGAGTACACCAAGGTTGAAAATGAAG |
| | CTCCATGGGTTACTGACAAAAGGCCACCACCAGATTGGCCATCTAAAGGTAAGATTCAGTTT |
| | AACAACTACCAGGTCAGATACAGACCAGAATTGGATTTGGTTTTAAGGGGTATTACCTGCGA |
| | TATTGGCTCTATGGAAAAGATAGGTGTTGTTGGTAGAACTGGTGCTGGTAAATCTAGTTTGA |
| | CTAACTGTTTGTTCAGAATCTTAGAAGCTGCTGGTGGTCAGATTATTATCGATGGTGTTGATA |
| | TTGCCTCCATCGGTCTACATGATTTGAGAGAAAAGTTGACCATCATTCCACAAGACCCAATTT |
| | TGTTCTCTGGCTCTTTGAGAATGAACTTGGATCCCTTCAACAATTACTCCGACGAAGAAATTT |
| | GGAAGGCTTTAGAATTGGCCCACTTGAAATCTTTTGTCGCTTCTTTACAATTGGGCTTGTCAC |
| | ATGAAGGTACTGAAGCTGGTGGTAACTTATCTATTGGTCAAAGACAGTTGTTGTGCTTGGGT |
| | AGAGCTTTGTTGAGAAAGTCTAAGATTTTGGTCTTGGACGAAGCTACTGCTGCTGTTGATCT |
| | AGAAACCGATAATTTGATTCAAACCACCATCCAAAACGAATTCGCTCATTGCACTGTTATCAC |
| | CATTGCTCATAGATTGCATACCATCATGGATTCCGATAAGGTTATGGTGTTGGATAACGGTA |
| | AGATTATCGAATGTGGTTCTCCAGAAGAGTTGTTGCAAATTCCAGGTCCATTTTACTTCATGG |
| | CTAAAGAAGCTGGTATCGAGAACGTTAATTCTACCAAGTTCTAA |
| SEQ ID | MLEKFCNSTFWNSSFLDSPEADLPLCFEQTVLVWIPLGFLWLLAPWQLLHVYKSRTKRSSTTKLYL |
| NO: 952 | AKQVFVGFLLILAAIELALVLTEDSGQATVPAVRYTNPSLYLGTWLLVLLIQYSRQWCVQKNSWFL |
| | SLFWILSILCGTFQFQTLIRTLLQGDNSNLAYSCLFFISYGFQILILIFSAFSENNESSNNPSSIASFLS |
| | SITYSWYDSIILKGYKRPLTLEDVWEVDEEMKTKTLVSKFETHMKRELQKARRALQRRQEKSSQQN |
| | SGARLPGLNKNQSQSQDALVLEDVEKKKKKSGTKKDVPKSWLMKALFKTFYMVLLKSFLLKLVN |
| | DIFTFVSPQLLKLLISFASDRDTYLWIGYLCAILLFTAALIQSFCLQCYFQLCFKLGVKVRTAIMASVY |
| | KKALTLSNLARKEYTVGETVNLMSVDAQKLMDVTNFMHMLWSSVLQIVLSIFFLWRELGPSVLA |
| | GVGVMVLVIPINAILSTKSKTIQVKNMKNKDKRLKIMNEILSGIKILKYFAWEPSFRDQVQNLRKK |
| | ELKNLLAFSQLQCVVIFVFQLTPVLVSVVTFSVYVLVDSNNILDAQKAFTSITLFNILRFPLSMLPM |
| | MISSMLQASVSTERLEKYLGGDDLDTSAIRHDCNFDKAMQFSEASFTWEHDSEATVRDVNLDI |
| | MAGQLVAVIGPVGSGKSSLISAMLGEMENVHGHITIKGTTAYVPQQSWIQNGTIKDNILFGTEF |
| | NEKRYQQVLEACALLPDLEMLPGGDLAEIGEKGINLSGGQKQRISLARATYQNLDIYLLDDPLSAV |
| | DAHVGKHIFNKVLGPNGLLKGKTRLLVTHSMHFLPQVDEIVVLGNGTIVEKGSYSALLAKKGEFA |
| | KNLKTFLRHTGPEEEATVHDGSEEEDDDYGLISSVEEIPEDAASITMRRENSFRRTLSRSSRSNGRH |
| | LKSLRNSLKTRNVNSLKEDEELVKGQKLIKKEFIETGKVKFSIYLEYLQAIGLFSIFFIILAFVMNSVAFI |
| | GSNLWLSAWTSDSKIFNSTDYPASQRDMRVGVYGALGLAQGIFVFIAHFWSAFGFVHASNILHK |
| | QLLNNILRAPMRFFDTTPTGRIVNRFAGDISTVDDTLPQSLRSWITCFLGIISTLVMICMATPVFTII |
| | VIPLGIIYVSVQMFYVSTSRQLRRLDSVTRSPIYSHFSETVSGLPVIRAFEHQQRFLKHNEVRIDTNQ |
| | KCVFSWITSNRWLAIRLELVGNLTVFFSALMMVIYRDTLSGDTVGFVLSNALNITQTLNWLVRM |
| | TSEIETNIVAVERITEYTKVENEAPWVTDKRPPPDWPSKGKIQFNNYQVRYRPELDLVLRGITCDI |
| | GSMEKIGVVGRTGAGKSSLTNCLFRILEAAGGQIIIDGVDIASIGLHDLREKLTIIPQDPILFSGSLRM |
| | NLDPFNNYSDEEIWKALELAHLKSFVASLQLGLSHEGTEAGGNLSIGQRQLLCLGRALLRKSKILVL |
| | DEATAAVDLETDNLIQTTIQNEFAHCTVITIAHRLHTIMDSDKVMVLDNGKIIECGSPEELLQIPGP |
| | FYFMAKEAGIENVNSTKF |
| SEQ ID | ATGGATGCTTTGTGTGGTTCTGGTGAATTGGGTTCTAAATTCTGGGATTCCAACTTGTCTGTT |
| NO: 953 | CACACTGAAAATCCAGATTTGACCCCATGCTTCCAGAATTCTTTGTTGGCTTGGGTTCCATGT |
| | ATCTATTTGTGGGTTGCTTTGCCATGTTACTTGTTGTATTTGAGACATCACTGCAGGGGTTAC |
| | ATCATCTTGTCTCATTTGTCTAAGCTGAAGATGGTTTTGGGTGTTTTGTTGTGGTGTGTTTCTT |
| | GGGCTGATTTGTTCTACTCTTTCCATGGTTTGGTTCATGGTAGAGCACCAGCTCCAGTTTTCTT |
| | TGTTACTCCATTGGTTGTTGGTGTCACTATGTTGTTGGCTACCTTGTTGATTCAGTACGAAAG |
| | ATTGCAAGGTGTCCAATCTTCTGGTGTTTTGATCATTTTCTGGTTCTTGTGTGTTGTTTGCGCT |
| | ATCGTTCCATTCAGATCCAAGATTTTGTTGGCAAAAGCCGAAGGTGAAATCTCTGATCCTTTT |
| | AGATTCACCACCTTCTACATTCATTTCGCCTTGGTTTTGTCCGCTTTGATTTTGGCTTGTTTCAG |
| | AGAAAAGCCACCATTCTTCTCTGCCAAAAACGTTGATCCAAATCCATATCCAGAAACCTCTGC |
| | TGGTTTCTTGTCTAGATTATTCTTTTGGTGGTTCACCAAGATGGCTATCTATGGTTATAGACAC |
| | CCATTGGAAGAAAAGGACTTGTGGTCTTTGAAAGAAGAGGACAGATCTCAAATGGTTGTCC |
| | AACAATTATTGGAAGCTTGGAGGAAGCAAGAAAAGCAAACTGCTAGACATAAGGCTTCAGC |
| | TGCTCCAGGTAAAAATGCTTCAGGTGAAGATGAAGTTTTGTTAGGTGCTAGACCAAGACCAA |
| | GAAAGCCATCATTTTTGAAGGCTTTGTTAGCAACCTTCGGCAGCTCTTTCTTGATTTCTGCTTG |
| | CTTCAAGTTGATCCAGGACTTGTTGTCCTTTATTAACCCACAGTTGCTGTCCATCTTGATCAGA |
| | TTCATTTCTAATCCAATGGCTCCATCATGGTGGGGTTTCTTGGTTGCTGGTTTGGATGTTCCA |
| | GTTGCTCCTTGGATGCAATCCTTGATTTTACAACATTACTACCACTACATCTTCGTCACCGGTG |
| | TTAAGTTTAGAACAGGTATTATGGGTGTCATCTACAGAAAGGCTTTGGTTATTACCAACTCCG |
| | TTAAGAGGGCTTCTACTGTTGGTGAAATCGTTAACTTGATGTCCGTTGATGCTCAAAGATTCA |
| | TGGACTTGGCTCCATTCTTGAACTTGTTATGGTCTGCTCCATTGCAAATTATCCTGGCCATATA |
| | CTTTTTGTGGCAGAATTTGGGTCCATCTGTTTTGGCTGGTGTTGCTTTTATGGTTTTGTTGATC |
| | CCATTGAATGGTGCTGTTGCTGTTAAGATGAGAGCTTTCCAAGTTAAGCAGATGAAGCTGAA |
| | GGATTCCAGGATTAAGTTGATGTCTGAAATCTTGAACGGCATCAAGGTCTTGAAATTATACG |
| | CTTGGGAACCCAGCTTTTTGAAACAAGTTGAAGGTATCAGACAGGGTGAATTGCAACTATTG |
| | AGAACTGCTGCTTACTTGCATACCACTACTACTTTTACTTGGATGTGCTCCCCATTCTTGGTTA |
| | CTTTGATTACATTGTGGGTTTACGTTTACGTCGATCCAAACAATGTTTTGGATGCTGAAAAGG |
| | CCTTCGTTTCTGTCTCTTTGTTCAACATTTTGAGGCTGCCATTGAACATGTTGCCACAATTGAT |
| | TTCTAACTTGACCCAAGCCTCTGTGTCCTTGAAAAGAATTCAACAGTTTCTGTCCCAAGAAGA |
| | ATTGGATCCACAATCCGTTGAAAGAAAGACTATTTCTCCAGGTTACGCCATTACCATTCATTC |
| | TGGTACTTTTACATGGGCCCAAGATTTGCCACCAACTTTACATTCTTTGGACATTCAAGTTCCA |
| | AAGGGTGCTTTAGTTGCTGTTGTTGGTCCAGTTGGTTGTGGTAAATCTTCTTTGGTTTCTGCT |
| | TTGTTGGGTGAGATGGAAAAATTGGAAGGTAAGGTTCACATGAAGGGTTCTGTTGCTTATGT |
| | TCCACAACAAGCTTGGATTCAAAACTGTACCTTGCAAGAAAATGTCTTGTTCGGTAAAGCTTT |
| | GAACCCAAAGAGATACCAACAAACTTTAGAAGCTTGTGCCTTGTTGGCAGATTTGGAAATGT |
| | TGCCAGGTGGTGATCAAACTGAAATTGGTGAAAAGGGTATCAACTTGTCAGGTGGTCAAAG |
| | ACAAAGAGTTTCTTTGGCTAGAGCTGTTTATTCCGATGCCGATATTTTCTTGTTGGATGATCC |
| | ATTGTCTGCCGTTGATTCTCATGTTGCTAAGCACATTTTCGATCATGTTATTGGTCCTGAAGGT |
| | GTTTTGGCAGGTAAAACTAGAGTTTTGGTTACCCACGGTATTTCTTTCTTGCCTCAAACCGAT |
| | TTCATTATCGTTTTGGCCGATGGTCAAGTTTCTGAAATGGGTCCATATCCTGCTCTGTTGCAA |
| | AGAAATGGTTCTTTCGCTAACTTCTTGTGTAACTACGCTCCAGATGAAGATCAAGGTCATTTG |
| | GAAGATTCTTGGACAGCTTTGGAAGGTGCTGAGGACAAAGAAGCTTTGTTGATTGAAGATA |
| | CCTTGTCCAACCATACCGATTTGACTGATAATGATCCAGTTACCTACGTTGTCCAAAAGCAAT |
| | TCATGAGACAGTTGTCAGCTTTGTCATCTGATGGTGAAGGTCAAGGTAGACCAGTTCCAAGA |
| | AGGCACTTAGGTCCATCAGAAAAAGTTCAAGTTACTGAAGCTAAAGCTGATGGTGCTTTGAC |
| | TCAAGAAGAAAAAGCTGCTATTGGTACTGTCGAGTTGTCTGTCTTTTGGGATTATGCTAAAG |
| | CAGTTGGTTTGTGTACTACCTTGGCTATTTGTTTGTTGTACGTTGGTCAATCTGCTGCTGCAAT |
| | TGGTGCTAATGTTTGGTTGTCTGCATGGACTAATGATGCTATGGCTGATTCTAGACAAAACA |
| | ACACCTCTTTGAGATTAGGTGTTTATGCTGCTTTGGGTATCCTACAAGGTTTCTTAGTTATGTT |
| | GGCTGCTATGGCAATGGCTGCTGGTGGTATTCAAGCTGCAAGAGTTTTACATCAAGCCCTGT |
| | TGCATAACAAGATCAGATCACCACAATCTTTCTTCGATACAACTCCATCCGGTAGAATTTTGA |
| | ACTGCTTCTCTAAGGATATCTACGTCGTTGATGAAGTATTGGCCCCAGTTATTTTGATGCTGT |
| | TGAACTCCTTTTTCAACGCCATTTCTACCTTGGTTGTTATCATGGCTTCTACCCCTTTGTTCACC |
| | GTTGTTATTTTGCCATTGGCTGTCTTGTACACTTTGGTCCAAAGATTTTACGCTGCTACCTCTA |
| | GACAATTGAAGAGATTGGAATCCGTTTCCAGATCTCCAATCTACTCCCATTTTTCTGAAACTG |
| | TTACTGGTGCCTCTGTTATTAGAGCTTACAACAGATCTAGAGACTTCGAGATTATCTCCGATA |
| | CCAAGGTTGATGCCAATCAAAGAAGTTGCTACCCCTACATTATTTCCAACAGATGGTTGTCTA |
| | TTGGTGTCGAATTCGTTGGTAATTGCGTTGTTTTATTTGCTGCCTTGTTTGCCGTTATCGGTAG |
| | ATCTTCATTGAACCCAGGTTTGGTTGGTTTGAGTGTTTCTTACTCATTGCAAGTTACCTTCGCT |
| | TTGAACTGGATGATCAGAATGATGTCCGATTTGGAATCTAACATCGTTGCAGTCGAAAGGGT |
| | CAAAGAATACTCTAAGACTGAAACTGAAGCTCCATGGGTTGTCGAAGGTTCTAGACCTCCAG |
| | AAGGTTGGCCACCAAGAGGTGAAGTTGAATTCAGAAATTACTCCGTCAGATACAGACCAGG |
| | TTTAGATTTGGTTTTGAGGGATTTGTCCTTGCATGTTCATGGTGGTGAAAAAGTTGGTATCGT |
| | TGGTAGAACTGGTGCTGGTAAATCATCTATGACTTTGTGCTTGTTCAGAATCTTGGAAGCTGC |
| | TAAGGGTGAAATTAGAATCGATGGTTTGAACGTTGCTGATATCGGTTTACATGACTTGAGAT |
| | CCCAATTGACCATCATTCCACAAGATCCAATTTTGTTCTCCGGTACTTTGAGAATGAACTTGG |
| | ATCCTTTTGGTTCCTACTCCGAAGAGGATATTTGGTGGGCTTTAGAATTGTCTCACTTGCACA |
| | CTTTCGTTTCTTCACAACCAGCAGGTTTGGACTTCCAATGTTCTGAAGGTGGCGAAAATTTGT |
| | CTGTTGGTCAGAGACAATTGGTTTGCTTAGCTAGAGCTTTGCTGAGAAAGTCCAGAATATTG |
| | GTTTTAGATGAAGCCACTGCCGCCATTGACTTGGAAACTGATAATTTGATTCAGGCCACTATC |
| | AGAACTCAATTCGATACTTGTACCGTCTTGACCATTGCTCATAGATTGAACACCATTATGGAT |
| | TACACCCGTGTTCTGGTTTTGGATAAGGGTGTTGTTGCTGAATTCGATTCTCCAGCAAATTTG |
| | ATTGCTGCCAGAGGTATTTTCTATGGTATGGCTAGAGATGCTGGTCTGGCTTAA |
| SEQ ID | MDALCGSGELGSKFWDSNLSVHTENPDLTPCFQNSLLAWVPCIYLWVALPCYLLYLRHHCRGYII |
| NO: 954 | LSHLSKLKMVLGVLLWCVSWADLFYSFHGLVHGRAPAPVFFVTPLVVGVTMLLATLLIQYERLQG |
| | VQSSGVLIIFWFLCVVCAIVPFRSKILLAKAEGEISDPFRFTTFYIHFALVLSALILACFREKPPFFSAK |
| | NVDPNPYPETSAGFLSRLFFWWFTKMAIYGYRHPLEEKDLWSLKEEDRSQMVVQQLLEAWRK |
| | QEKQTARHKASAAPGKNASGEDEVLLGARPRPRKPSFLKALLATFGSSFLISACFKLIQDLLSFINP |
| | QLLSILIRFISNPMAPSWWGFLVAGLDVPVAPWMQSLILQHYYHYIFVTGVKFRTGIMGVIYRKA |
| | LVITNSVKRASTVGEIVNLMSVDAQRFMDLAPFLNLLWSAPLQIILAIYFLWQNLGPSVLAGVAF |
| | MVLLIPLNGAVAVKMRAFQVKQMKLKDSRIKLMSEILNGIKVLKLYAWEPSFLKQVEGIRQGELQ |
| | LLRTAAYLHTTTTFTWMCSPFLVTLITLWVYVYVDPNNVLDAEKAFVSVSLFNILRLPLNMLPQLIS |
| | NLTQASVSLKRIQQFLSQEELDPQSVERKTISPGYAITIHSGTFTWAQDLPPTLHSLDIQVPKGALV |
| | AVVGPVGCGKSSLVSALLGEMEKLEGKVHMKGSVAYVPQQAWIQNCTLQENVLFGKALNPKRY |
| | QQTLEACALLADLEMLPGGDQTEIGEKGINLSGGQRQRVSLARAVYSDADIFLLDDPLSAVDSHV |
| | AKHIFDHVIGPEGVLAGKTRVLVTHGISFLPQTDFIIVLADGQVSEMGPYPALLQRNGSFANFLCN |
| | YAPDEDQGHLEDSWTALEGAEDKEALLIEDTLSNHTDLTDNDPVTYVVQKQFMRQLSALSSDGE |
| | GQGRPVPRRHLGPSEKVQVTEAKADGALTQEEKAAIGTVELSVFWDYAKAVGLCTTLAICLLYVG |
| | QSAAAIGANVWLSAWTNDAMADSRQNNTSLRLGVYAALGILQGFLVMLAAMAMAAGGIQA |
| | ARVLHQALLHNKIRSPQSFFDTTPSGRILNCFSKDIYVVDEVLAPVILMLLNSFFNAISTLVVIMAST |
| | PLFTVVILPLAVLYTLVQRFYAATSRQLKRLESVSRSPIYSHFSETVTGASVIRAYNRSRDFEIISDTKV |
| | DANQRSCYPYIISNRWLSIGVEFVGNCVVLFAALFAVIGRSSLNPGLVGLSVSYSLQVTFALNWMI |
| | RMMSDLESNIVAVERVKEYSKTETEAPWVVEGSRPPEGWPPRGEVEFRNYSVRYRPGLDLVLRD |
| | LSLHVHGGEKVGIVGRTGAGKSSMTLCLFRILEAAKGEIRIDGLNVADIGLHDLRSQLTIIPQDPILF |
| | SGTLRMNLDPFGSYSEEDIWWALELSHLHTFVSSQPAGLDFQCSEGGENLSVGQRQLVCLARAL |
| | LRKSRILVLDEATAAIDLETDNLIQATIRTQFDTCTVLTIAHRLNTIMDYTRVLVLDKGVVAEFDSPA |
| | NLIAARGIFYGMARDAGLA |
| SEQ ID | ATGGGCTCCTCATTGGAAGATCAAAAGATCTTGCATAGACAGAAGAGGTTGTTGTC |
| NO: 955 | TCCATTCTTGTCTAAAAAGGTTCCACATGTTCCAACCGAAGATGAACGTAGACCATA |
| | TCCAGCTTCTAAGGCTAACGTTATCTCCAGAATTTTCTTCTGGTGGTTGTCCCCAGTT |
| | ATGAAAACTGGTTACAAAAGAACCTTGCAACCAGAGGATTTGTTCTACTTGACCGAT |
| | GATATTAAGGTTCAAACCATGGCCGATTCCTTCTACTTGTATATGACTCACGATATC |
| | GATAGAGCCAAGCAGAAGTTCTTGATCAAAAAGTGCAAAGAAAGGGGTGAAACCT |
| | TGGAAACTTCTTCCGTTGATAGAGAAGTTGACTTGAAGGACTTCCAGTTGTCTAAGT |
| | TCATTACCGTTTGGGCTTTAGCTAAGACTTTCAAGTGGCAATATTCTTGGGCTTGTTT |
| | CTGTTTGGCTTTGTCTAATGTTGGTCAAACTACCATGCCTTTGCTGACCAAAAAGTTG |
| | ATCCAATACGTTGAATTGAAGGCCTTGGGTGACGAAACTGGTATTGGTAAAGGTTT |
| | GGGTTACTCTTTTGGTACTGCTGCTATCGTTTTTATCGTTGGCGTTTTGATTAACCAC |
| | TTCTTCTACAGATCTATGTTGACTGGTGCTCAAGCTAAAGCTGTTTTGACAAAAGCTT |
| | TGCTGGACAAGTCTTTCAAGTTGTCCTCTGAAGCTAAACATAAGTACCCACCAGGTA |
| | AGATTACTTCCATGTTGGGTACTGATTTGTCCAGAATTGATTTCGCTTTGGGTTTCCA |
| | ACCATTCTTGATCGTTTTCCCAATTCCAATTGGTATCGCCATTGCCATTTTGATTGTCA |
| | ATATCGGTGTTTCCTCTTTGGTTGGTGTTGCTATTTTGTTCGTTTTCATGATCGGTATT |
| | GCTTTCTCTACTGGTGCTTTGTTGGCTTACAGAAAGAAGGCTAATTTCTTCACCGATA |
| | CCAGAGTCAACTACATCAAAGAAGCTCTGAACAACCTGAAGGTCATCAAGTTTTACT |
| | CTTGGGAACCACCATACCACGAAAACATTTCCAACGTCAGAAAGAAAGAGATGAGG |
| | ATCATCTACAGAATGCAGATCTTGAGAAATATCGTTACCTCCTTCGCTATGTCTTTGA |
| | CTTTGTTTGCTTCTATGACTGCCTTCTTGGTCTTGTACGCTATTGCTAATGGTAGAAG |
| | AGATCCAGCCTCTATCTTTTCCTCATTGTCTTTGTTCAACACTTTGACCCAACAGGTTT |
| | TCTTGTTGCCAATGGCTTTGGCTACAGGTGCTGATGCTTTTATGGGTATTTCTAGAG |
| | TTGGTGAGTTCATGTCCCAAAACGAAGTTCATCCTGAAGAAAACAGAATTGAAGCT |
| | CCACCTGAAGTCCAAAAAGAAATGGACAGAGAAGGTTTGGCCATCGAAGTTAATCA |
| | TGCTGATTTTGAGTGGGAAGTGTTCGAAGATGACGAAGAAGAAGAGGAAGCTGGT |
| | AAAGAAAAAGAGAAAGAAAAAGAAAAGAAGAAAGAGAAAGAGAACGGTTTCGAA |
| | GCTGGTTTCGAAAACAAAAAGAAAATGAACAAGATGTCCAAGAAAAAGCGTGAAA |
| | AGAAAGAAACTAAGAAGGCCGAATCCTTCGAAAACGAAACCATTCATGATTCCCAT |
| | ACCGAAAAGTTGTCTACCAAGGATTCTGATTTTACCGCTGATACCTCTAGTGAAGAG |
| | GAATTGGTTTTCGACGGTTTGAAGAACATCAACTTCAACATCAAGAAGGGTGAATT |
| | CGTTGTTATCACCGGTTTGATTGGTTCCGGTAAATCTTCTTTGTTAGCTGCTATGTCT |
| | GGTTTCATGAAGAGATTGAGAGGTTCTGTTAATGTCAACGGCTCTTTGTTGTTGTGT |
| | GGTCAACCATGGGTTCAAAACAACACTGTTAAGGACAACATTATCTTCGGCTCCAAA |
| | TACGACGAAGAAAAGTACAAGAGAGTGATCTACTCTTGCTCCTTGGAATCCGATTT |
| | GGAAATTTTGCCAGCTGGTGATAGAACCGAAATTGGTGAAAGAGGTATTACTTTGT |
| | CTGGTGGTCAAAAGGCTAGAATCAATTTGGCTAGAGCTGTTTATGCCGATAAGGAC |
| | ATCATTTTGTTGGATGATGTTTTGTCCGCTGTTGATGCAAGAGTTGGTATTCATATTA |
| | TGAACAACTGCATCCTGGACCTGCTTAAAGAGAAAACTAGAATCTTGGCTACCCATC |
| | AGTTGTCTTTAATTGGTTCTGCCGATCGTATCATCTTCTTGAATGGTGATGGTAGTGT |
| | TGATGTCGGTACTTTCGAAGAATTGAAAGAAGCTAACCCAGGTTTCGGTAACTTAAT |
| | GACTTACAACCACGAACACGAGAAAGAGGAAGAAGTCGATATAGAACAGTTGTCC |
| | GAAGAAGAGTTGGAAGAAGAGAAGAAGTTGATCGAAAGACAATTGACTCAGAGA |
| | ACTACCAGAACCACAAGATCTATTGGTCCTGAAAATGAGGAAGAGGACGACGACG |
| | AAGAGGCTAGACATCATGAATTCAATTTGGACGAAACAGCCGATGGTACTTTGATA |
| | GGTTCTGAAGAAAGGGCTGTTAATGCTATTGGTTGGGATGTTTACGCTAGGTACAT |
| | TAGATTAGGTTCAGGTAGATTCACTCCCTGGTTGATTTTGCCTGCTTTATTGACTGCT |
| | ATGCTGTTGTCTACTTTCTCCCAAATTTTCACTAACACCTGGTTGTCATTTTGGACCTC |
| | TTACAAGTTTAACAGGCCCAACAAATTCTACATCGGCATCTACATTATGTTCACGTTC |
| | TTGTCGTTCTTTCTGCTGACCATCGAATTCATCATCTTGGTCTATATTACCAACACCG |
| | CCTCTGTTATGTTGAATGTTATGGCTGTTAAGAGAGTTTTACACGCCCCAATGTCTTT |
| | TATGGATACAACTCCAATGGGCAGAATCTTGAACAGATTCACTAAGGATACCGATG |
| | TCTTGGATAACGAAATCGGTGATCAAATGCGTTTCTTCTTGTTCACCTTCTGCAACAT |
| | CATTGGTGTCTTGATTTTGTGCATCATCTACTTGCCATGGTTCGCTATTGCAATTCCA |
| | TTTTTGGGTGTCGTCTTTGTTTCCATTGCTAACTATTATCAAGCCTCCGCAAGAGAAG |
| | TTAAGAGATTGGAAGCTGTTCAAAGGTCCTTGGTTTACAACAATTTCAACGAAACCT |
| | TGTCTGGTATGCCAACCATTAAGGCTTATAATGCTACCTCTAGATTCATGGACAAGA |
| | ACAATTTCTTGATTGACAAGATGAATGAGGCCTACTACATCACTATCGCTAATCAAA |
| | GATGGTTGGCCATTCACATGGATTTCATTGCATCTTTGTTCGCCTTGTTGATTGCCTT |
| | GTTATGTGTCAACAGGGTGTTCAATATTGGTGCTTCTTCAGTTGGTCTGATCGTGTC |
| | TTACGTTTTTCAAATTGCTGGCCAGTTGTCCATGTTGATTAGAACTTTTACCCAAGTC |
| | GAGAACGAAATGAACTCCGCTGAAAGATTATCTTCTTACGCTACTTCTTTGCCTGAA |
| | GAGGCTCCATATGTTATTACTGAAAGAACTCCACCACCAGATTGGCCATCTAAAGGT |
| | GGTATTATCTTTGATCATGCTTCCTTGGCTTATAGACCAGGTTTGCCATTGGTTTTAA |
| | AGGACTTGACTTTCAGAGTTGAGCCCATGGAAAAGATTGGTATTTGTGGTAGAACT |
| | GGTGCTGGTAAGTCATCTATTATGACAGCCTTGTACAGGTTGTCTGAATTGGAATCT |
| | GGTAAGATCGAAATCGATGACATTGACATTTCTACCTTGGGTTTGAGAGACTTGAG |
| | ATCCAAATTGTCCATCATTCCTCAAGATCCAGTCTTGTTTAGAGGCACCATTAGAAA |
| | GAACTTGGATCCATTTGGTGAACACTCCGATGATAAGTTGTGGGATGCTTTGAGAA |
| | GAACTGGTTTGATCGAAGAATCCAGATTAGAAGCCGTCAAAAAGCAGACCAAAGTT |
| | TCTTCTGCTACTACTACAACAGCTGCCAATTCTGAAAAAGGTGATGCTACTGCTACT |
| | GCCACTACAACTACTCCATTGAACAAGTTCCATTTGGACCAAACCGTTGAAGATGAA |
| | GGTTCTAATTTCAGCTTGGGTGAAAGACAGTTGATTGCTTTTGCTAGAGCTTTGGTT |
| | AGAGACTCGAAAATCTTGATCTTGGATGAAGCCACATCCTCCGTTGATTACGAAACT |
| | GATTTCAAGGTTCAACAGACCATCGTTAGAGAATTTGGTGATTGCACCATTTTGTGT |
| | ATCGCCCATAGATTGAAAACCATCATCAACTACGACAGGATCTTGGTTTTGGATAAG |
| | GGTGAAATCAAAGAATTCGACACCCCACTGAACCTGTTTAATTTGGAAGGTGGCAT |
| | TTTCCAACAAATGTGCCAAAGATCTAACATCACCCAAGAGGATTTCTCTAACACCAA |
| | GAATTTCTAA |
| SEQ ID | MGSSLEDQKILHRQKRLLSPFLSKKVPHVPTEDERRPYPASKANVISRIFFWWLSPVMK |
| NO: 956 | TGYKRTLQPEDLFYLTDDIKVQTMADSFYLYMTHDIDRAKQKFLIKKCKERGETLETSSV |
| | DREVDLKDFQLSKFITVWALAKTFKWQYSWACFCLALSNVGQTTMPLLTKKLIQYVELK |
| | ALGDETGIGKGLGYSFGTAAIVFIVGVLINHFFYRSMLTGAQAKAVLTKALLDKSFKLSSE |
| | AKHKYPPGKITSMLGTDLSRIDFALGFQPFLIVFPIPIGIAIAILIVNIGVSSLVGVAILFVFMI |
| | GIAFSTGALLAYRKKANFFTDTRVNYIKEALNNLKVIKFYSWEPPYHENISNVRKKEMRII |
| | YRMQILRNIVTSFAMSLTLFASMTAFLVLYAIANGRRDPASIFSSLSLFNTLTQQVFLLPM |
| | ALATGADAFMGISRVGEFMSQNEVHPEENRIEAPPEVQKEMDREGLAIEVNHADFEW |
| | EVFEDDEEEEEAGKEKEKEKEKKKEKENGFEAGFENKKKMNKMSKKKREKKETKKAESF |
| | ENETIHDSHTEKLSTKDSDFTADTSSEEELVFDGLKNINFNIKKGEFVVITGLIGSGKSSLLA |
| | AMSGFMKRLRGSVNVNGSLLLCGQPWVQNNTVKDNIIFGSKYDEEKYKRVIYSCSLES |
| | DLEILPAGDRTEIGERGITLSGGQKARINLARAVYADKDIILLDDVLSAVDARVGIHIMNN |
| | CILDLLKEKTRILATHQLSLIGSADRIIFLNGDGSVDVGTFEELKEANPGFGNLMTYNHEH |
| | EKEEEVDIEQLSEEELEEEKKLIERQLTQRTTRTTRSIGPENEEEDDDEEARHHEFNLDETA |
| | DGTLIGSEERAVNAIGWDVYARYIRLGSGRFTPWLILPALLTAMLLSTFSQIFTNTWLSF |
| | WTSYKFNRPNKFYIGIYIMFTFLSFFLLTIEFIILVYITNTASVMLNVMAVKRVLHAPMSF |
| | MDTTPMGRILNRFTKDTDVLDNEIGDQMRFFLFTFCNIIGVLILCIIYLPWFAIAIPFLGVV |
| | FVSIANYYQASAREVKRLEAVQRSLVYNNFNETLSGMPTIKAYNATSRFMDKNNFLIDK |
| | MNEAYYITIANQRWLAIHMDFIASLFALLIALLCVNRVFNIGASSVGLIVSYVFQIAGQLS |
| | MLIRTFTQVENEMNSAERLSSYATSLPEEAPYVITERTPPPDWPSKGGIIFDHASLAYRP |
| | GLPLVLKDLTFRVEPMEKIGICGRTGAGKSSIMTALYRLSELESGKIEIDDIDISTLGLRDLR |
| | SKLSIIPQDPVLFRGTIRKNLDPFGEHSDDKLWDALRRTGLIEESRLEAVKKQTKVSSATT |
| | TTAANSEKGDATATATTTTPLNKFHLDQTVEDEGSNFSLGERQLIAFARALVRDSKILILD |
| | EATSSVDYETDFKVQQTIVREFGDCTILCIAHRLKTIINYDRILVLDKGEIKEFDTPLNLFNL |
| | EGGIFQQMCQRSNITQEDFSNTKNF* |
| SEQ ID | ATGGCTGTTTACGCTAGAAGAACCCCAGTTATTACTGTTAGACACCAAAGAATCTTC |
| NO: 957 | GGCTTCAGATCCATTTCTGTTCAATTGACTGCTTTGGCTGTTGCCTTTAGATCTCAAG |
| | CTCATCAAAAGGTTGATTCCAACACCGTTATCTACCAAGCTTATAGAGTTCCACCATT |
| | GCCATCTCAAGACGAAAGAAATGCTTTTCCAGAAAAGACTGCTAACCCATTGTCCAG |
| | AGTTTTCTTTTGGTGGTTGAATCCAGTTATGAAGACCGGTTACAAAAGAACCTTGCA |
| | ACCAGATGATTTGTTCTACTTGGGTGATGATTTCGTTGTTAAGCCAAAGGCCGATAA |
| | GTTCATCGAAATCTTCAACAGAAGATTGGCCAAGGCCAAAGAAAACCATATCTTGC |
| | AAAAGTGCAAAGAGAGGAACGAATCTATCGATTCCTCATCCGTTTCCAAAGAAGAG |
| | GATATGGAAGATTTTTCACCACCAAAGGCTATTACCGCTTTGTCTTTGTTGGAAACC |
| | TTCAAGATCAGATACTTCATGGCTTGTTTGTTGTTGACCATCTGTAACGTTGCTCAAA |
| | CTTTGAATCCCCTGTTGACCAAGAAGTTGATCCAATTTGTTGAAAGACGTGCTGCTG |
| | GTGTTGAATCTAGAGTTGGTCCAGGTGTTGGTTATGCTATTGGTGCTTCTTTGCTGG |
| | TTTTGGTTATTGGTATTTTCGTCAACCACTTCTTCTACAACTCTATGATGTGTGGTGC |
| | TTTCTCTAAAGCTGTTTTGACTAAGGCTATGCTGGACAAGTCTTTTAAGCAAAATGC |
| | CGAATCCAGATCTAAATACGGTGCTGGTAAAGTCACTTCTATGATGGGTACTGATTT |
| | GGCCAGAATTGATTTCGCTATTGGTTTCCAGCCATTCATCATTACTTTTCCAGTTCCA |
| | GTCATTATCGCTATCGCCATTTTGATCGTTAATGTTGGTCCATCTGCTTTGGTTGGTG |
| | TAGGTTTGTTACTGTTCTTCGTGTTTTTCATGATGTGGTGCGCTAAGCAATTCTTCTC |
| | ATACAGAGTTATTGCCAACAAGTTCACCGATAAGAGGGTGTCTTATATCAAAGAGG |
| | TCCTGAACAACCTGAAGATCATCAAGTTTTATTCTTGGGAACCACCATACCACGAAA |
| | ACATTTCTGATGTCAGGTACAAAGAGATGAAGAACATCTTGAAGATGCAGGTCTTG |
| | AGGAACATTTTGATGGCTTTGGCTATGTCTATGACCACCTTATCTTCTATGGCTACTT |
| | TCTTGACCTTGTACGGTGCTAAAAATGGTAAAGATGATGCCGCCTCTATCTTCTCCTC |
| | AATTTCTTTGTTTAACGTCTTGTCCCAGCAGGTTTTGATGTTGCCATTGGCTTTAGCA |
| | GCCGGTGTTGATTGCATGACTGGTTTGATAAGAGTCGGTAGATATTTGGCCTCCTCT |
| | GAAATTGATCCAGAATCCAATAGAATCGATGCCGACTCTGAAAAGATCGTTGAAAT |
| | GGATTCTAACGACTTGTCTATCGAAGTTAACAACGCTAACTTCGAATGGGAAACTTT |
| | CGAATTGCAGGACGAAGAAAACGAAGTTGACTTGATCAACCTGAACAAGAAGTAC |
| | AGAAAGCAATTGGCCAGAGAAGAGAAGCTTAAGAAGAAGTTGTCTCAGAACTCTTC |
| | TACCGAAAACGACGAAAAGTTGGAAGAATCTAACTACCATGCAGACCCAGAAGGT |
| | AAAGAATTGAAGGATTCTTCTTCCAATGACACCTCCTTGGAAGATTCAAATTTCGCT |
| | GGTTTGAACAACATCGACTTGAAGATTAAGAAGGGTGAATTCGTTGTCATCACCGG |
| | TTTGATTGGTTCTGGTAAATCCTCTTTGTTGTTAGCCTTGTCCGGTTTTTATGAAGAGA |
| | ACTTCTGGTTCTGTTAACGTCAACGGTTCCTTGTTGTTGTGTGGTTACCCATGGATTC |
| | AAAACGATACCGTTAAGTCCAACATCTTGTTCGGTGAAGAATTGGATGAAGCCAAG |
| | TACTCTGAAGTTGTTTACGCATGTTCATTGGAATCCGACTTGGAAATTTTGCCAGCT |
| | GGTGATGCTACTGAAATTGGTGAAAGAGGTATTACTTTGTCCGGTGGTCAAAAGGC |
| | TAGAATCAATTTGGCTAGAGCTGTCTACAACAACAAGGACATTATCTTGTTGGACGA |
| | TGTTTTGTCTGCTGTTGATGCAAGAGTTGGTAAGCACATTATGAACAACTGCATCTT |
| | GGGTTTGTTGAAGGATAAGACCAGAATTTTGGCTACCCACCAATTGTCTTTAATCGG |
| | TTCTGCTGATAGAGTCATCTTCTTGAATGGTGATGGTTCAGTTTCTGTTGGTGCTGTC |
| | GAAGAATTGAGGGAAAACAATTTCGCCTTTAACAACTTGATGGCCTTCAACTCTGAA |
| | ACTAAGGATGAAGAAGAAGAGAAAGAGGAAGAAAACGAGGACGAGGAACAAGA |
| | AGCTCAAGAATTCGAATCCATCAAGAGACAGTTGTCCAAGATTCCCACTAACAAAG |
| | AAAAAGATGAAGAGGCCATCCACAAGGATTACAATCAAAACAATACTGAGGACGG |
| | CAAGTTGATGGCATCTGAAGATAGGGCTATCAACGGTATTAAGTTGGATGTCTACA |
| | AAAAGTACATCCACTACGGTTCCGGTAAGATTGGTTCATTGGTTATGTGTTTTGCCA |
| | TCGTTTTGGCAGTTGTTTTGGCAACTTTCTGCCAATTATTCACTAACACCTGGTTGTC |
| | ATTCTGGACCGAAAAGAAATTTCCAGGTAAGTCTGATGGTTTCTACATCGGTTTTTA |
| | CGTTATGTTCGCTGTCTTGTCTGGCCTGTTGATTATGATTGAGTTTATCTTCTTCGTG |
| | CTGTTGACTAACACTGCCTCTAAGAACTTGAATATCTTGGCCGTTAAGAAAGTCTTG |
| | CATGCTCCAATGTCTTTCATGGATACAACTCCAATGGGTAGAATCTTGAACAGATTC |
| | ACTAAGGATACCGATGCCTTGGATAATGAATTGGGTGATCAAATCCGTATGCTGTTC |
| | TTCTTTTTCGGTAATATTGCCGGTGTTTTGATCTTGTGTGTTATCTACTTGCCATGGTT |
| | CGCAATTGCTATTCCATTTTTGGTTGCTTTGTTCATCGGTGTTGCTAATTACTATCAA |
| | GCTTCCGCTAGAGAAATCAAGAGATTGGAAGCTTTACAAAGGTCCCACGTTTACAA |
| | CAACTTTAACGAAACATTGAACGGCATGAACACCATTAAGGCTTACAAAGCTGATC |
| | ACATCTACTTGAGGAAGAACGAGTTTTTCCTAAACAAGATGAACGAAGCCTACTACT |
| | TGACTATTGGTAATCAAAGATGGCTGGCCATTCATTTGGATTGCTTGGCTACTATTT |
| | TCGCCTTGATTATTGCCTTGTTGTGCGTTTTTAGGGTGTTCTCTATTGGTCCAGCTTC |
| | AGTTGGTTTGTTATTGTCTTACGTCTTGCAAATTGCCGGTCAGTTGTCTATGTTGATT |
| | AGAACTTACACCCAGGTCGAAAACGAAATGAATGCAGTTGAAAGAATGTGCTCCTA |
| | CGCTTTTGATTTGCCTCAAGAAGCCCCATTCAAAATCTCTGAAACAACTCCACCACCA |
| | GAATGGCCCGAACAAGGTTCTATTAAGTTTGAAGATGTTTCCTTGGCTTACAGACCA |
| | GGTTTGCCATTAGTTTTGAAGAACTTGTCCTTGCAAGTTGAGCCATCACAAAAGATT |
| | GGTATCTGTGGTAGAACTGGTGCAGGTAAATCTTCTATTATGACTGCCTTGTACAGG |
| | CTGTCTGAATTGTCTACTGGTAAGATCGAAATCGATGGTATCGACATTTCGTCTTTG |
| | GGTTTGAGTTCTTTGAGGTCCAAATTGTCCATCATTCCACAAGATCCAGTTTTGTTCC |
| | AAGGCACCATTAGAAAGAATCTGGACCCTTTTAATGAACACCCTGATGACTTGTTGT |
| | GGGATTCTTTGCGTAGAGCTGGTTTAATTGAAGAGGCTAAATTGAAGTCCGTCAAG |
| | AGGCAAAATGATGAGTCTGAAGAATACCACAAGTTCCACTTGAATCAAGAGGTTGA |
| | AGATGATGGTGCTAACTTCTCATTGGGTGAAAGACAGTTGATTGCTTTTGCTAGAGC |
| | TTTGGTTAGAGACTCGAAGATCTTGATTTTAGACGAAGCTACTTCCTCCGTTGATTA |
| | CGAAACTGACAACAAGATTCAATCTACCATCGTCAGGGAATTCTCTAAGTGTACCAT |
| | TTTGTGCATTGCCCACAGATTGAAAACCATCTTGAACTACGATAAGATCCTGGTCTT |
| | GGATAAGGGTGAGATCAAAGAATTTGATACCCCATGGAATTTGTTCAACACCGAGG |
| | ATTCTATTTTCCAGCAAATGTGCGAAAGATCCAACATCACAGTCGAAGATTTCCAAA |
| | ACTTGCAGAGGATGTGA |
| SEQ ID | MAVYARRTPVITVRHQRIFGFRSISVQLTALAVAFRSQAHQKVDSNTVIYQAYRVPPLPS |
| NO: 958 | QDERNAFPEKTANPLSRVFFWWLNPVMKTGYKRTLQPDDLFYLGDDFVVKPKADKFIE |
| | IFNRRLAKAKENHILQKCKERNESIDSSSVSKEEDMEDFSPPKAITALSLLETFKIRYFMAC |
| | LLLTICNVAQTLNPLLTKKLIQFVERRAAGVESRVGPGVGYAIGASLLVLVIGIFVNHFFYN |
| | SMMCGAFSKAVLTKAMLDKSFKQNAESRSKYGAGKVTSMMGTDLARIDFAIGFQPFII |
| | TFPVPVIIAIAILIVNVGPSALVGVGLLLFFVFFMMWCAKQFFSYRVIANKFTDKRVSYIKE |
| | VLNNLKIIKFYSWEPPYHENISDVRYKEMKNILKMQVLRNILMALAMSMTTLSSMATFL |
| | TLYGAKNGKDDAASIFSSISLFNVLSQQVLMLPLALAAGVDCMTGLIRVGRYLASSEIDP |
| | ESNRIDADSEKIVEMDSNDLSIEVNNANFEWETFELQDEENEVDLINLNKKYRKQLARE |
| | EKLKKKLSQNSSTENDEKLEESNYHADPEGKELKDSSSNDTSLEDSNFAGLNNIDLKIKKG |
| | EFVVITGLIGSGKSSLLLALSGFMKRTSGSVNVNGSLLLCGYPWIQNDTVKSNILFGEELD |
| | EAKYSEVVYACSLESDLEILPAGDATEIGERGITLSGGQKARINLARAVYNNKDIILLDDVL |
| | SAVDARVGKHIMNNCILGLLKDKTRILATHQLSLIGSADRVIFLNGDGSVSVGAVEELRE |
| | NNFAFNNLMAFNSETKDEEEEKEEENEDEEQEAQEFESIKRQLSKIPTNKEKDEEAIHKD |
| | YNQNNTEDGKLMASEDRAINGIKLDVYKKYIHYGSGKIGSLVMCFAIVLAVVLATFCQLF |
| | TNTWLSFWTEKKFPGKSDGFYIGFYVMFAVLSGLLIMIEFIFFVLLTNTASKNLNILAVKK |
| | VLHAPMSFMDTTPMGRILNRFTKDTDALDNELGDQIRMLFFFFGNIAGVLILCVIYLPW |
| | FAIAIPFLVALFIGVANYYQASAREIKRLEALQRSHVYNNFNETLNGMNTIKAYKADHIYL |
| | RKNEFFLNKMNEAYYLTIGNQRWLAIHLDCLATIFALIIALLCVFRVFSIGPASVGLLLSYV |
| | LQIAGQLSMLIRTYTQVENEMNAVERMCSYAFDLPQEAPFKISETTPPPEWPEQGSIKF |
| | EDVSLAYRPGLPLVLKNLSLQVEPSQKIGICGRTGAGKSSIMTALYRLSELSTGKIEIDGIDI |
| | SSLGLSSLRSKLSIIPQDPVLFQGTIRKNLDPFNEHPDDLLWDSLRRAGLIEEAKLKSVKRQ |
| | NDESEEYHKFHLNQEVEDDGANFSLGERQLIAFARALVRDSKILILDEATSSVDYETDNKI |
| | QSTIVREFSKCTILCIAHRLKTILNYDKILVLDKGEIKEFDTPWNLENTEDSIFQQMCERSNI |
| | TVEDFQNLQRM* |
| SEQ ID | ATGGTCGAATTGGAAAAGGGTTCCGAACCAGAATTGCAACATAGATTATTGACCCC |
| NO: 959 | ATTCCTGTCTAAAAAGGTTCCACCAGTTCCACATGATGAAGATAGACCATATCATCC |
| | AAAATGGCGTAACCCATTCTCTTTCTTGTTTTTCACTTGGTTGACCCCAGTTTTGTTG |
| | GTTGGTTACAAAAGAACTTTGTTGCCAGAGGACATGTTCAAGTTGCATGAAGGTAT |
| | TACTGCTGAACATTTGGCCGAAAAGTTCCAAAGAATCTTCGACAGAAGATTGGCCC |
| | AAGATAAGCAAAGACACTTGAAAGAAAAAGCTAAGGCTAGAGGTGAAACCTTGGA |
| | AACTTCTTCTGTTGAATCCGTTGATGACATGGCTGATTACGAATTGTCTAAGTCTTTG |
| | TGCTTCTTGACCTTGTACGAAACTTTCGCTAGACAATACTCTTTGGCTTTGGTTTTTG |
| | CTACCTTGGGTATGTCTTGTTCTACCTGTATTCCTTTGTTGTCCCGTAAGCTGATTAA |
| | CTTCGTTTCTGAAAAAGCCTACGGCTTCAATTTGAATATGGGTACTGGTGTTGGTTA |
| | CGCTATTGGTGTTGCTATTTTGATCTTCACTGGTGACGTTTTGATTAACCAGGGTGTT |
| | TACTTGTCTATGATTACCGGTGCTCAAATTAGAGCTGTTTTCACCAAGTTGTTGCTG |
| | GACAAGTCTTTTAAGTTGAACGCCAAGTCTAGAAAGCAATTCCCAGCTTCTAAGATT |
| | ACCGCTATTATGTCTACCGATGTTTCCAGAGTTGACTTAGGTACTGGTTTTTCTATCT |
| | ACGGTTTCGTGTTTGTTTTCCCAGTTGGTATTTCCATTGGTATCTTGGTCTACAACAT |
| | TAAGGCTCCAGCTATGGTTGGTGTAGGTTTGATGATTGCCTTTTTGTTCGTTGCTGG |
| | TATTTTGGGTGCTATGTTGTTCTCTTTCAGAAAAACCGCTCAAAAGTCCACTGATGCT |
| | AGAGTTTCTTACATGAAGGAAGTCCTGAACAACCTGAAGATGATCAAGTTTTACTCT |
| | TGGGAAAAGCCCTACTTCAGCTTGATTTCCAAAATCAGACGTAGAGAAATGGCCTA |
| | CTTGTTGAGAATGGAAATCACGAGAATGATCATAATCACCTTGGCTTCATCTCTGAC |
| | CTTGATTTCTTCTTTGGCATCCTTCTTGACTCTGTATGCTATTGCTTCTCCATCTTCTA |
| | GAAATCCAGCCGATATTTTCTCATCCGTTGCTCTGTTTAATATGTTGGCTGGTCAATT |
| | CGTTGTCCTGCCATTGTCTATTGCTGGTTCTACTGATGCATTTTTGGGTATGAATAGA |
| | GTTGCTGCTGTTTTGGCTGCTGACGAAATTGATCCAAAAGATTCCGTTAGATTGATC |
| | ACCGATGACGAAAGAACTGCTATGCAAGAAAACAAGTTGGCTGTTTCTGTTAGAGA |
| | TTGCGATTTCGAATGGGAGATCTTCGATTTGAAAGAGGAAAAGACTGAGGACCAA |
| | ACGAAGGATAACAAAGAGCTGAAAAAAGAAAAGAAAGAAATGAAGAAGAAAAAG |
| | AAAGAAGAGAAGAAAGCCCAGAAGGCCTCTAAATCTAATTCTCCATCACCTGAAGT |
| | TGACGAAAAGACAGGTGAAGTTTCTAGCTTCAAGTTGAACAACATCAACTTGGATG |
| | TTAAGGACGGTGAATTCGTCGTTATTACAGGTTCTATTGGTTCCGGTAAGTCCTCTT |
| | TGTTGCATGCTTTGGATGGTACGATGAAGAAAAACTCTGGTAAGTTGTTGTTGAAC |
| | GGTTCCTTGTTGATGTGTGGTGTTCCATGGATTCAAAACAACACCTTGAGAGAGAA |
| | CATCTTGTTTGGTTCTCCATATGACGAAGCTTGGTACAACAAGGTTGTTGAAGCTTG |
| | TTCTTTGAACTCCGATTTTGATTTGTTGCCTGCTGGTGATAGAACCGAAATTGGTGA |
| | AAGAGGTATTACATTGTCTGGTGGTCAAAAAGCCAGAGTTTGTTTGGCTAGAACTG |
| | TCTACGAAGATTCCTCCATTATCTTGTTGGATGATGTTTTGTCAGCTGTTGATGCCAA |
| | GGTTGGTAAGCACATTATGAACGAATGTTTGTTGGGCCTGTTGAAGAACAAAACTA |
| | GAATTTTGGCTACCCACCAGCTGTCTTTGATTTCTGAAGCTGAATCTGTCGTTTTCTT |
| | GAACGGTGATGGTTCTATTTCTAGGGGTTCTTTCGAAGAATTGAAGAGATCTAATCC |
| | AGCCTTCAACACTTTGATGGAACACTCTAGAAAGAACGAGGATTCTGATGACGAAG |
| | AAGAAGATTTGAAGGGCGCTCCAGACGAAAAAGAATTGATTAACAGACAGTTGAC |
| | CAGACAAACCACCACTCAAATTTCTGACGATTCTAACGAATCTGGTTTGCCAGAAGG |
| | TGACGGTAAATTGATTGGAGAAGAGGAAAGATCCATTAACGCAATTGGTTGGGAT |
| | GTTTACGGTAGATATGTTTTGACCGGTGTTGATGGTTTTAAGCTGAATTGGCCAGTT |
| | TACTTGGTTTTCGGTGCTACTGTTTTTACCACGTTCTTGACTTTGTTCACGAACAACT |
| | GGTTGTCCTTTTGGATACAAATGAAGTGGGATTACTCCGACGGTTACTATATTGGTC |
| | TATACGCTATGTTTACCGCTTTGGCTGTTATGTTCATGATTACCCAATTCTGCGGTGT |
| | CATCTACATTTTGAATAGAGCCTCCAGAATCTTGAACATCAAGGCTTTGGAAAGGAT |
| | CTTGCATGTTCCAATGGCTTTTATGGATACAACTCCAATGGGTAGAGTGATCAACAG |
| | ATTCACTAAGGATACTGATACCTTGGATAACGAAATCGGTGATAGAGTTTCCATGGT |
| | CGTCTACTTTTTGTCTGATATCGTTGGCATTATCATCCTGTGCATTATCTACATGCCAT |
| | GGTTTGCTATTGCCGTTCCATTCATTATCGGTTTCTTCATTATTCTGGCTACCTTCTAT |
| | CAAGCCTCTGGTAGAGAAGTTAAGAGATTGGAAGCTATCCAAAGATCCCACGTGTA |
| | CAACAATTTCAACGAATCTTTGACTGGTATGCCAACCATTAAGGCCTTTAAGTCTATT |
| | GGTAGATTCCTGGAAAAGAACGTCAAGACGATTAACAAGATGAACGAAGCCTACTA |
| | CATTACCGTTGCTAATCAAAGATGGTTGGATGTCCATTTGTCTATGTTGGCATCATCT |
| | TTCGCTTTCTTGATTGCCATGTTGTGCGTTTTCAGAGTTTTCAATATCAACCCAGCTT |
| | CCGTTGGTTTGTTGTTGTCTTATGTCTTGCAAATCTCCTCCACCGTTTCAATGTTGGTT |
| | GTCGTTTTTACTCAAGTCGAACAGGATATGAACTCTGCCGAAAGAGTTATCGAATAC |
| | GTTTACAAGATCCCTCAAGAAAAGGCCTACGAAATCTCTGAAACAAAACCAGCTCC |
| | AGAATGGCCAGCTCATGGTGAAATCAAGTTTATTAACGTTGGTTTCGCCTACAGAG |
| | AAGGTTTGCCATTGACTTTGAAGAACTTCAACGTCGATATTAAGCCACACGAAAAG |
| | ATTGGTATTTGTGGTAGAACTGGTGCCGGTAAATCTTCTATTATGGTTGCCTTGTTC |
| | AGAATCGCTGAATTGTCTGCTGGTTCCATAGTTATTGATGGTGTTGATATCTCTACTT |
| | TGGGCTTGCATGATTTGAGATCCAGATTGTCCATTATTCCACAAGATCCAGTCTTGTT |
| | CAAGGGCACCATTAGAAAGAATTTGGATCCATTCGGTACTAAGACCGACGAAGAAT |
| | TATGGGATACTTTGAGAAGGGCCGATATCATTTCTGCTGAAACTTTGGAAGAAGTC |
| | AAGGCTCAAAAACCAGGTGATGATGATTTCAACAAGTTCCACTTGGATGGTGAAGT |
| | TGATGATGAAGGTGAAAACTTCTCATTGGGTGAAAGACAATTAGTTGCTTTTGCTA |
| | GAGCCTTGGTTAGAAACACCAAGATTTTGGTTTTAGACGAAGCCACCTCTTCAGTTG |
| | ATTATGCTACTGATTCTAAGCTGCAAAAGGCTATTGCCAGAGAATTTTCTGGTTGTA |
| | CCATTTTGTGCATTGCCCACAGATTGAAAACCATCTTGAACTACGATAGGATCATGG |
| | TTATGGACCAAGGTTCCATTTCTGAATTCGATACTCCAACGAACCTGTTCAACTCTAC |
| | ATCTTCTTTGTTCAGACAAATGTGCGACAAGTCCGGTATCTCTCAATTCGATTTTGAA |
| | GAGTAA |
| SEQ ID | MVELEKGSEPELQHRLLTPFLSKKVPPVPHDEDRPYHPKWRNPFSFLFFTWLTPVLLVG |
| NO: 960 | YKRTLLPEDMFKLHEGITAEHLAEKFQRIFDRRLAQDKQRHLKEKAKARGETLETSSVES |
| | VDDMADYELSKSLCFLTLYETFARQYSLALVFATLGMSCSTCIPLLSRKLINFVSEKAYGFN |
| | LNMGTGVGYAIGVAILIFTGDVLINQGVYLSMITGAQIRAVFTKLLLDKSFKLNAKSRKQ |
| | FPASKITAIMSTDVSRVDLGTGFSIYGFVFVFPVGISIGILVYNIKAPAMVGVGLMIAFLFV |
| | AGILGAMLFSFRKTAQKSTDARVSYMKEVLNNLKMIKFYSWEKPYFSLISKIRRREMAYL |
| | LRMEITRMIIITLASSLTLISSLASFLTLYAIASPSSRNPADIFSSVALFNMLAGQFVVLPLSI |
| | AGSTDAFLGMNRVAAVLAADEIDPKDSVRLITDDERTAMQENKLAVSVRDCDFEWEIF |
| | DLKEEKTEDQTKDNKELKKEKKEMKKKKKEEKKAQKASKSNSPSPEVDEKTGEVSSFKL |
| | NNINLDVKDGEFVVITGSIGSGKSSLLHALDGTMKKNSGKLLLNGSLLMCGVPWIQNN |
| | TLRENILFGSPYDEAWYNKVVEACSLNSDFDLLPAGDRTEIGERGITLSGGQKARVCLAR |
| | TVYEDSSIILLDDVLSAVDAKVGKHIMNECLLGLLKNKTRILATHQLSLISEAESVVFLNGD |
| | GSISRGSFEELKRSNPAFNTLMEHSRKNEDSDDEEEDLKGAPDEKELINRQLTRQTTTQI |
| | SDDSNESGLPEGDGKLIGEEERSINAIGWDVYGRYVLTGVDGFKLNWPVYLVFGATVFT |
| | TFLTLFTNNWLSFWIQMKWDYSDGYYIGLYAMFTALAVMFMITQFCGVIYILNRASRIL |
| | NIKALERILHVPMAFMDTTPMGRVINRFTKDTDTLDNEIGDRVSMVVYFLSDIVGIIILCII |
| | YMPWFAIAVPFIIGFFIILATFYQASGREVKRLEAIQRSHVYNNFNESLTGMPTIKAFKSIG |
| | RFLEKNVKTINKMNEAYYITVANQRWLDVHLSMLASSFAFLIAMLCVFRVFNINPASVG |
| | LLLSYVLQISSTVSMLVVVFTQVEQDMNSAERVIEYVYKIPQEKAYEISETKPAPEWPAH |
| | GEIKFINVGFAYREGLPLTLKNFNVDIKPHEKIGICGRTGAGKSSIMVALFRIAELSAGSIVI |
| | DGVDISTLGLHDLRSRLSIIPQDPVLFKGTIRKNLDPFGTKTDEELWDTLRRADIISAETLE |
| | EVKAQKPGDDDFNKFHLDGEVDDEGENFSLGERQLVAFARALVRNTKILVLDEATSSV |
| | DYATDSKLQKAIAREFSGCTILCIAHRLKTILNYDRIMVMDQGSISEFDTPTNLFNSTSSLF |
| | RQMCDKSGISQFDFEE* |
| SEQ ID | ATGACCGAATTGGAAAAGGCTGATCCACCAGTTTTACAAAAGAGATTATTGACGCC |
| NO: 961 | CTTCCTGTCTAAAAAGGTTCCACCTGTTCCATTGGAAGATGAACGTCCATATCATCC |
| | AAAATGGCGTAATCCATTCTCGTTCTTGTTTTTCACTTGGTTGACTCCAGTTTTGAGA |
| | AGAGGTTACAAGAGAACATTGCAGCCAGAAGATATGTTCAAGTTGCATGATCAAAT |
| | GACCGCTGAATACTTGGCTGGTAAGTTCGAAAGAATCTTCTACAGAAGGTTGGCTG |
| | CTGACAAAGAAAGACATTTGTTGCAAAAAGCCGAATCCAGAGGTGAAACTTTGGAA |
| | ACTTCTTCCGTTGATTCCGATGATGATTTCGCTGATTACCAATTGCCAAAGTCTTTGT |
| | GCTTCTTGTCCTTGTACGAAACTTTTGCTTGGCAATACTCTTTGGCTTTGTTCTTTGGT |
| | GTTTTGGGTATGTCTTGTTCTACCTGCATTCCCTTGTTGTCCAAAGAATTGATCAACT |
| | TCGTTTCCGCTAAGGCTTTTGGTATGGATGTTAATATGGGTAGAGGTGTTGGTTACG |
| | CTATTGGTGTTTCCATTTTGATCTTCACTGGTGACATCTTGATTAACCAGGGTATCTA |
| | CTTGTCTATGTTGACCGGTGCTCAAATTAGAGCTATTTTCACCAAGTTGCTGCTGGA |
| | CAAGTCTTTTAAGTTGAACACCAAGTCCAGAAAGCAATTCCCAGCTTCTAAGATTAC |
| | CTCCATTATGTCTACCGATGTTTCCAGAGTTGACTTAGGTACTGGTTTTTCTATCTAC |
| | GGCTTCATCTTCATTTTCCCAGTTGGTATTTCCATCGGTATCTTGGTTTACAATATTA |
| | GAGCACCAGCTATGGTTGGTGTCGGTTTGATGATTGCATTTTTGTTTGTTGCCGGCT |
| | TCCTGTCCTTTTTGTTGTTTTCTTTTAGACAAACGGCCCAGAAATCCACTGATGCTAG |
| | AGTTTCTTACATGAAGGAAATCCTGAACAACCTGAAGATGATCAAGTTCTACTCTTG |
| | GGAAATCCCCTACTTCAAGTTGATTTCCAAGATCAGACGTAGAGAAATGGCCTACTT |
| | GTTGAGAATGGAAATTACCCGTATGATCATTATCACCTTGGCCTCATCTTTGACCTTG |
| | ATTTCTTCATTGGCTTCGTTCCTAACCTTGTACGGTATTGCTTCTCCATCTGCTAGAA |
| | ATCCAGCAGATATTTTCTCTTCTGTTGCCCTGTTTAATATGTTGGCTGGTCAATTCGT |
| | TGTCCTGCCATTGTCTTTGGCTGGTTCTACTGATGCATTCTTGGGTATGAATAGAGTT |
| | GCTGCAGTTTTAGCTGCTGACGAAATTGATCCAAACGATTCCGTTCATATGATCACC |
| | GATTCTGAAATCACTTCCATGCAAGAAAAGAAGTTGGCCATCTCTGTTAGAGATTGT |
| | GATTTCGAATGGGAAGTTTTTAACTTCAAAGAAGAGAAGTCTGAGGATCAGACTAA |
| | GGATACTGAAGAGTTGAAGAAAGAAAAGAAAGAGCTGAAGCAGAAGAAGAAAGA |
| | AGAAAAGAAGGCCAACAAGAAGTCCAAGGGTTCTAAATCTCCAACTCCAGCTAGTG |
| | AAGAAAAAGAGGCTGAAGTTGCTTCCTTTAAGTTGCACGATATCAACTTGGATGTA |
| | CGTGATGGTGAATTCATGGTTATTACCGGTTCTATCGGTTCCGGTAAATCTTCTTTGT |
| | TGTATGCTTTGGACGGCACCATGAAGAAGAATGCTGGTAAATTGCTATTGAACGGC |
| | TCTTTGTTGATGTGTGGTGCTCCATGGATTCAAAACTCTACTTTGAGAGAAAACATC |
| | ACCTTCGGTTCTCCATATGACGAAAAATGGTACAACAAGGTTGTTAACGCTTGCTCT |
| | TTGGATTCCGATTTCGATTTGTTGCCAGCTGGTGATAGAACTGAAATTGGTGAAAG |
| | AGGTATTACCTTGTCTGGTGGTCAAAAAGCAAGAGTTTGTTTGGCTAGAACTGTTTA |
| | CGCTGACTCCTCTATTATCTTGTTGGATGATGTTTTGTCCGCTGTTGATGCTAAAGTT |
| | GGTAGGCATATTATGTCCGAATGTATCTTGGGTTTGCTGAAGGATAAGACTGTTGTT |
| | TTGGCTACCCATCAGTTGTCTTTGATTTCTGAAGCTGAATCCGTCGTTTTCTTGAATG |
| | GTGATGGTACTATTTCCAGAGGTACTTTCGATGAATTGAAGAGAACTAACTCTGCTT |
| | TCGCTACCTTGATGGAACACTCTCAAAACAACGAGGACACCGAAGAAGATTCAAAC |
| | GAACAAGGTCCAACTAACGAGAAAGAGTTGATTAACAGACAGTTGACTAGACAAA |
| | CCACCACTCAAGTTTCTGAAGAAACTGACGAAAAGAACTTCACCGAATCTGATGGT |
| | AGATTGATCATGGACGAAGAAAGATCCGTTAATGCTATTGGTTGGGATGTTTACGG |
| | CAAGTACATTTTGACTGGTGTTGAAGGTTTTAAGGCCAACTGGTTGATCTACGTTGT |
| | TTTCGCTATTACTGTCTTGACTACCTTCTTGACTTTGTTCACCAACAACTGGCTGTCTT |
| | TTTGGATCTCTATGAAGTTCGATAGATCCGACGGTTTTTACATTGGCTTGTACGCTAT |
| | GTTTACCGTTTTGGCTGTTCTGTTCATGGTTTCTCAATTCTGCGGTGTTATCTTCATCT |
| | TGAACAGAGCCTCTAGGATTTTGAACATTAAGGCCATTGAAAGGATCTTGCACGTC |
| | CCAATGTCTTTTATGGACACTACTCCAATGGGCAGAGTTATCAATAGATTCACAAAG |
| | GATACCGACACCTTGGATAATGAGATAGGTGATAGAGTCTCCATGGTCAACTACTTT |
| | TTGTCCGATTTGATCGGCATTATCATCCTGTGCATTATCTACATGCCATGGTTTGCTA |
| | TTGCCGTTCCATTCATTATTGGCCTGTTTATTATCGCTGCTACCTTCTATCAAGCTTCT |
| | GGTAGAGAAGTTAAGAGATTGGAAGCCATCCAAAGATCCCATGTTTACAACAATTT |
| | CAACGAGTCCTTATCTGGTATGCCAACCATCAAAGGTTTTGGTTCTATTGGTAGATT |
| | CCTGCAGAAGAACGTTAGCACCATTAACAAAATGTCCGAAGCCTACTTCATTACCGT |
| | TGCTAATCAAAGATGGTTGGATGTCCATTTGTCAATGTTGGCATCTTCTTTCGCTTTC |
| | TTGATCTCCATGTTGTGCGTTTTCAGAGTTTTCGATATTGGTGCTTCTTCAGTCGGTT |
| | TGTTGTTGTCCTATGTCTTGCAAATCTCCTCCATGATTTCTATGTTGGTGGTTGTTTTC |
| | ACCCAAGTCGAACAAGATATGAACTCTGCTGAAAGAGTCATCGAATACGTTTACAA |
| | GATCCCACAAGAAAATGCTTACCAGATCTCTGAAACAAAGCCTTCTCCAGAATGGCC |
| | ACAAAATGGTGAAATTAGATTCTTGAACGTTGACTTCGCTTACAGAGAAGGTTTGCC |
| | ATTGACACTGAAGAACTTTAACGCTGATATTAGGCCACACGAAAAGATTGGTATTT |
| | GTGGTAGAACTGGTGCAGGTAAGTCATCTATTATGGTTGCCTTGTTCAGAATTGCTG |
| | AATTGACTTCCGGTACTATTGAAATCGATGGTGTTGATGTTAGAACCTTGGGTTTAC |
| | ACGATTTGAGGTCCAAGTTGTCCATTATTCCACAAGATCCAGTCTTGTTCAAGGGCA |
| | CTATTAGAAAGAATTTGGACCCATTCGGTACTAAGTCTGATGATGAATTGTGGGAT |
| | ACCTTGAGAAGATCCGATATTATCTCTGCCGATAAGTTGGAAGCTGTTAAGGCTCAA |
| | AAAGTTGGTGATGATGACTACAACAAGTTCCACTTGGATTCTGAAGTTGATGACGA |
| | AGGTGAAAACTTCTCTTTGGGCGAAAAACAATTGGTTGCTTTTGCTAGAGCTTTGGT |
| | GAGAAACTCCAAGATTTTGGTTTTAGACGAAGCTACCTCCTCTGTTGATTATGCTAC |
| | TGATTCTAAGTTGCAAAAGGCTATCGCTAGAGAATTTGCTGATTGCACCATATTGTG |
| | CATTGCCCATAGATTGAAAACGATCTTGAACTACGATCGTGTTATGGTTATGGACCA |
| | GGGTGAGATCAAAGAATTCGATACTCCAAGAAACCTGTTCAACTCCAGAAACACCA |
| | TTTTCAGACAAATGTGCGATAAGTCCGGTATTTCTACTTCTGATTTCGGTGCTTGA |
| SEQ ID | MTELEKADPPVLQKRLLTPFLSKKVPPVPLEDERPYHPKWRNPFSFLFFTWLTPVLRRGY |
| NO: 962 | KRTLQPEDMFKLHDQMTAEYLAGKFERIFYRRLAADKERHLLQKAESRGETLETSSVDS |
| | DDDFADYQLPKSLCFLSLYETFAWQYSLALFFGVLGMSCSTCIPLLSKELINFVSAKAFGM |
| | DVNMGRGVGYAIGVSILIFTGDILINQGIYLSMLTGAQIRAIFTKLLLDKSFKLNTKSRKQF |
| | PASKITSIMSTDVSRVDLGTGFSIYGFIFIFPVGISIGILVYNIRAPAMVGVGLMIAFLFVAG |
| | FLSFLLFSFRQTAQKSTDARVSYMKEILNNLKMIKFYSWEIPYFKLISKIRRREMAYLLRM |
| | EITRMIIITLASSLTLISSLASFLTLYGIASPSARNPADIFSSVALFNMLAGQFVVLPLSLAGS |
| | TDAFLGMNRVAAVLAADEIDPNDSVHMITDSEITSMQEKKLAISVRDCDFEWEVENFK |
| | EEKSEDQTKDTEELKKEKKELKQKKKEEKKANKKSKGSKSPTPASEEKEAEVASFKLHDIN |
| | LDVRDGEFMVITGSIGSGKSSLLYALDGTMKKNAGKLLLNGSLLMCGAPWIQNSTLRE |
| | NITFGSPYDEKWYNKVVNACSLDSDFDLLPAGDRTEIGERGITLSGGQKARVCLARTVY |
| | ADSSIILLDDVLSAVDAKVGRHIMSECILGLLKDKTVVLATHQLSLISEAESVVFLNGDGTI |
| | SRGTFDELKRTNSAFATLMEHSQNNEDTEEDSNEQGPTNEKELINRQLTRQTTTQVSEE |
| | TDEKNFTESDGRLIMDEERSVNAIGWDVYGKYILTGVEGFKANWLIYVVFAITVLTTFLT |
| | LFTNNWLSFWISMKFDRSDGFYIGLYAMFTVLAVLFMVSQFCGVIFILNRASRILNIKAIE |
| | RILHVPMSFMDTTPMGRVINRFTKDTDTLDNEIGDRVSMVNYFLSDLIGIIILCIIYMPW |
| | FAIAVPFIIGLFIIAATFYQASGREVKRLEAIQRSHVYNNFNESLSGMPTIKGFGSIGRFLQ |
| | KNVSTINKMSEAYFITVANQRWLDVHLSMLASSFAFLISMLCVFRVFDIGASSVGLLLSY |
| | VLQISSMISMLVVVFTQVEQDMNSAERVIEYVYKIPQENAYQISETKPSPEWPQNGEIR |
| | FLNVDFAYREGLPLTLKNFNADIRPHEKIGICGRTGAGKSSIMVALFRIAELTSGTIEIDGV |
| | DVRTLGLHDLRSKLSIIPQDPVLFKGTIRKNLDPFGTKSDDELWDTLRRSDIISADKLEAVK |
| | AQKVGDDDYNKFHLDSEVDDEGENFSLGEKQLVAFARALVRNSKILVLDEATSSVDYAT |
| | DSKLQKAIAREFADCTILCIAHRLKTILNYDRVMVMDQGEIKEFDTPRNLFNSRNTIFRQ |
| | MCDKSGISTSDFGA* |
| SEQ ID | ATGGATCATGAATCCGCTGCTTTTTCATCTAGAGCACCACCATTGAGACAAAACAGA |
| NO: 963 | TTATTGTCTCCTCTGTTCACCAAAAAGGTTCCACCAGTTCCACAAGATCACGAAAGA |
| | CATACTTATCCCTTGTACGGTAATCCAATCTCCTGGTTTTTCTTTACTTGGTTGTGGCC |
| | AGTTATGATCACTGGTTACAAAAGAACTTTGGAACCAGACGACCTGTACAAGTTGA |
| | ATGATAAGTTGAAAGCTGATGCTTTGGCTGCTAGATTCGAAGCTATTTTTGCTAGAA |
| | GATTGGCCGAAGATAAGAGAAGGCATTTGGATCAAACTCTGGACTCCTCTAAGATC |
| | TCTAACTCTTCTAAGAACTCCTCCAACTCTCCAGATTTGGATGATTTGGCCGATTTGG |
| | CTGACTATGTTCCATCTGATACTTTGTGTTTGTGGTCCTTGTTCGAAACTTTCAAGTG |
| | GCAATATTTGACCGCTTGTTTCTTGTGTGCTTTAGCTCAAGTTGGTTGGACTTGTAAT |
| | CCTCTGTTGTCCAAGAAATTGATCGCCTACGTTCAAAGAAAGGCCTTGGGTATTGAA |
| | TCTGATACAGGTAAAGGTGTTGGTTACGCTTTGGGTGTTTCTTTGGTTGTTTTCTGCT |
| | CCGACATCTTGTTTAACCAGATGTACTACTTGTCCTCTTTGACTGGTGCTGAATCTAA |
| | GGCTATTTTCACCAAAGTTATGCTGGACAAGTCCTTCAGATTGAATGCTAGATCAAG |
| | AAGAGTTTACCCCGTTTCCAAGATTACCTCTATTATGTCTACCGATGTCTCCAGAATC |
| | GATTTGGGTTTAGCTACTGCTCCAATGATTATAGTTGCTCCAGTTCCATTGGCCATTT |
| | CCATTGGTATTTTGATCCATAACTTGAAGGCTCCAGCCTTGTTAGGTATTGGTATCAT |
| | GATTTTGTTCTTGGGTTTCGCTGGTTTCTTGGGTAGTTTGTTGTTTAAGTACAGAAA |
| | GTTGGCTACTACCCAAACCGATGCTAGAGTTTCTTATATGAAGGAAGTCCTGAACAA |
| | CCTGAAGATGATCAAGTTTTACTCTTGGGAAAAGCCCTACATGGCTATGATTAAGGC |
| | TGTCAGAGAAAAAGAGATGACCTTCTTGTTGAAGATGCAAGTCACCAGATCCATCA |
| | TTATTTCCGTTGCTGTTTCCTTGTCTTTGGTAGCTTCTTTTGCTAGCTTCATGTTGTTG |
| | TATGGTACTGCCTCTGTTTCTAAGAGAAATCCAGCTTCTATCTTCTCTTCTGTTGCCCT |
| | GTTCAATATTTTGGCCTCCGTTTTTATCAACCTGCCATTGGCTATTGCTGGTGCTACT |
| | GATGCTTATATTGGTATGAGAAGAGTCGGTCAATACTTGGCTTCTGATGAACACGTT |
| | GAGGATAAGAAGAGAGTTACTTCTGAAACCGACAGACAATTGATGGAAGAAAAGA |
| | ATTTGGCCATCACCGTTTCTAACGCTAATTTCGAATGGGAAATCTTCGATATCCCAG |
| | ACGAGGAAAAGATCAAAGAAGAAAAGAAGAAACAAAAGGACAAAGAGAAGAACG |
| | ACAAAAAGAACAAGAAAAAGAAGTTGTCCTCCGACGAATCTTCTCATGAAGCTGTT |
| | ACACAATCTGAAAAGCCAACTTCTGCTGCTACCTTTAAGTTGAGAAACATCGATTTG |
| | ACCATCATGAAGGGTGAATTCGTTGTTGTTACTGGTTCTATCGGTTCCGGTAAATCA |
| | TCTTTGTTGTTGGCTTTGGAAGGTTCCATGAAGAGAAATTCTGGTCAAGTTAAGACC |
| | AACGGCTCTTTGTTGATGTGTGGTGCTCCATGGATTCAATCCTCTACTATTAGAGAA |
| | AACGTCATTTTCAACAACCCCTACAACAAGTCTTGGTACGAACAAGTTATTGATGTT |
| | TGCTGCATGGACTCCGATTTGGAAATTTTGCCAGCTGGTGATCAAACCGAAATAGG |
| | TGAAAGAGGTATTACTTTGTCTGGTGGTCAAAAGGCTAGATTGTCTTTAGCTAGAG |
| | CTGTTTACGCTAGATCCGATATCATTTTGTTGGATGATGTCTTGTCTGCTGTTGATGC |
| | TAAAGTTGGTAAGAGAATCGTTGACGAATGTATCTTAGGTGTCTTGAGAAAGAAAA |
| | CCGTTGTTTTGGCTACTCACCAGTTGTCCTTGATTGAATCAGCAGATAAGATCGTGT |
| | TCTTGAATGGTGATGGTACAGTTGATGTTGGTACTTCCGAATCTTTGAGAAGATCTA |
| | ACGAAGCCTTCCAGAAGTTGTTGTCTCATTCTACTACTGAAAAGTACGCCGAAGAG |
| | GAATCCTCTATTTCTTCACAAACTGACGAGTCCATCAAGAAGGTTGTTGTTGAAGCT |
| | CAGATTTCCAGATTGACTTCCGTTTCTTCAACTAACGAAAAGACCGACTTGCAAAAG |
| | CAGAACGAAGGTAAATTGATCATGGAAGAGGAAAAGTCCGTTAACGCTATTAACGC |
| | TGATGTTTACGTTAGGTACATTTTCGCAGGTATTCCAGGTGTTAAGGGTGCTATGAT |
| | TTTTGCTGCTGTTATCATCTTCTCCATCCTGTCCGTTTTCTTTAACTTATTCACTTCCAC |
| | CTGGTTGTCTTTTTGGGTTGAGTACAAATGGCGTAATAGATCTGATGGTTTCTACAT |
| | TGGTTTTTACGCTGCTTTCACAGTTTTGGCCTTGGTTACTTTGACTTTTGGTTTCTCTG |
| | GTGTCATCTACGTCATGAACTTATCTTCTAGAACCTTGAACATTAGAGCCGCCGAAA |
| | GAATCTTGTATGTTCCAATGTCTTACATGAACGTTACCCCAATGGGTAGAATCATTA |
| | ACAGATTCACTAAGGATACCGACGTGTTGGATAACGAAATGGGTGATAGAATGGG |
| | TATGATTATCTACTTCGCCTCCATTATTGGTGGCGTTTTGATTTTGTGTATCATCTACT |
| | TGCCATGGTTCGCTATAGCTGTTCCATTTTTGATTGTCGTTTTCTTCGGTTTTGCTAAC |
| | TTCTACCAAGCTTCTGGTAGAGAAATCAAGAGATTGGAAGCTGTTCAAAGGTCCTT |
| | GGTCTACAACAATTTCAACGAAACTTTGACCGGTTTGGATACCATTAGAGGTTACGA |
| | TAAGACCGATGTGTTCCTGTCTAAGAACATCAGATTGATCGACAAGATGAACGAGG |
| | CTTACTTCATTACCGTTGCTAATCAAAGATGGTTGGATGTTGCAGTTTCTTTCTTGGC |
| | TACAATTTTCGCCATCATCATCTCATTCTTGTGCGTGTTTAGAGTGTTCAAGATTAAC |
| | GCTTCTTCCGTTGGTTTGCTGTTGTCTAATACCTTGCAAATCTCCGGTATTATCACCA |
| | CATTGGTTGTCGTTTACACCAGAGTTGAACAAGATATGAACTCCGCTGAAAGGATC |
| | ATCGAATACGTTGATGATTTGCCACAAGAAGCTCCATACACCATTTCTGAAACTACT |
| | CCAAATCCATCTTGGCCTCAACAAGGTCAAATTGACTTTAACCATGTTAACTTGGCTT |
| | ACAGACCAGGTTTGCCAATGGTTTTGAAGGATTTCACCGTTCATATTGACCCAAACG |
| | AGAAGATCGGTATTTGTGGTAGAACAGGTGCTGGTAAATCTTCTATTATGGTTGCCT |
| | TGTACAGAATGGTCGAATTGACCTCTGGTAACATTACCATTGATGGTATCGATATCA |
| | GAACCTTGGGCTTGAACAATTTGAGGTCCAAGTTGTCCATTATTCCACAGGATCCAG |
| | TTTTGTTCCAAGGCACTATTAGAAAGAACTTGGATCCATTTGGTTCCGCTACAGATG |
| | AACAATTGTGGGAAACTTTAAGAAGGGCCAGAATCATCAAGTCCGAAGATTTGAAT |
| | GAAGTCAAGTCTCAAACCGATCCTAACAAGATGCATAAGTTCCACTTGGATAGAGA |
| | TGTTGATGTCGATGGTGAAAACTTCTCCTTGGGTGAAAAACAATTGATTGCTTTTGC |
| | CAGAGCTTTGGTCAGAGGTTCTAAAATCTTGATTTTGGATGAAGCCACCTCCTCAGT |
| | TGATTATGCAACCGATAAGATATTGCAAGAAGCCATCGTTGAAGAATTCTCCGATTG |
| | CACTATTTTGTGCATTGCCCATAGACTGAAAACCATCTTGAACTACGATAGAGTTAT |
| | GGTCATGGATCAAGGTCAAGTTGTTGAATTCGATAAGCCCATCAACCTGTTTAAGA |
| | AGCAAGGTACTTTCTTCCAGATGTGTGAAAAGGCTGGTATCAACGAAAAAGAATTC |
| | GGTCACTGA |
| SEQ ID | MDHESAAFSSRAPPLRQNRLLSPLFTKKVPPVPQDHERHTYPLYGNPISWFFFTWLWP |
| NO: 964 | VMITGYKRTLEPDDLYKLNDKLKADALAARFEAIFARRLAEDKRRHLDQTLDSSKISNSSK |
| | NSSNSPDLDDLADLADYVPSDTLCLWSLFETFKWQYLTACFLCALAQVGWTCNPLLSKK |
| | LIAYVQRKALGIESDTGKGVGYALGVSLVVFCSDILFNQMYYLSSLTGAESKAIFTKVMLD |
| | KSFRLNARSRRVYPVSKITSIMSTDVSRIDLGLATAPMIIVAPVPLAISIGILIHNLKAPALL |
| | GIGIMILFLGFAGFLGSLLFKYRKLATTQTDARVSYMKEVLNNLKMIKFYSWEKPYMAM |
| | IKAVREKEMTFLLKMQVTRSIIISVAVSLSLVASFASFMLLYGTASVSKRNPASIFSSVALF |
| | NILASVFINLPLAIAGATDAYIGMRRVGQYLASDEHVEDKKRVTSETDRQLMEEKNLAIT |
| | VSNANFEWEIFDIPDEEKIKEEKKKQKDKEKNDKKNKKKKLSSDESSHEAVTQSEKPTSA |
| | ATFKLRNIDLTIMKGEFVVVTGSIGSGKSSLLLALEGSMKRNSGQVKTNGSLLMCGAPW |
| | IQSSTIRENVIFNNPYNKSWYEQVIDVCCMDSDLEILPAGDQTEIGERGITLSGGQKARL |
| | SLARAVYARSDIILLDDVLSAVDAKVGKRIVDECILGVLRKKTVVLATHQLSLIESADKIVFL |
| | NGDGTVDVGTSESLRRSNEAFQKLLSHSTTEKYAEEESSISSQTDESIKKVVVEAQISRLTS |
| | VSSTNEKTDLQKQNEGKLIMEEEKSVNAINADVYVRYIFAGIPGVKGAMIFAAVIIFSILS |
| | VFFNLFTSTWLSFWVEYKWRNRSDGFYIGFYAAFTVLALVTLTFGFSGVIYVMNLSSRTL |
| | NIRAAERILYVPMSYMNVTPMGRIINRFTKDTDVLDNEMGDRMGMIIYFASIIGGVLIL |
| | CIIYLPWFAIAVPFLIVVFFGFANFYQASGREIKRLEAVQRSLVYNNFNETLTGLDTIRGYD |
| | KTDVFLSKNIRLIDKMNEAYFITVANQRWLDVAVSFLATIFAIIISFLCVFRVFKINASSVGL |
| | LLSNTLQISGIITTLVVVYTRVEQDMNSAERIIEYVDDLPQEAPYTISETTPNPSWPQQGQ |
| | IDFNHVNLAYRPGLPMVLKDFTVHIDPNEKIGICGRTGAGKSSIMVALYRMVELTSGNIT |
| | IDGIDIRTLGLNNLRSKLSIIPQDPVLFQGTIRKNLDPFGSATDEQLWETLRRARIIKSEDL |
| | NEVKSQTDPNKMHKFHLDRDVDVDGENFSLGEKQLIAFARALVRGSKILILDEATSSVD |
| | YATDKILQEAIVEEFSDCTILCIAHRLKTILNYDRVMVMDQGQVVEFDKPINLFKKQGTF |
| | FQMCEKAGINEKEFGH* |
| SEQ ID | ATGGCCGAATTGGAAAAGGGTGATGATGCTCAACCAGCTTTACAACATAGATTGTG |
| NO: 965 | TACACCCTTGTTGTCCAAAAAGGTTCCACCAGTTCCAAGAGATGAAGATAGACCAG |
| | TTCATCCAAAAGCTACCAATCCATTCTCTTGGTTTTTCTTCACTTGGTTGACTCCAGTT |
| | TTGTTGAGAGGTTACAAGAGAACTTTGTTGCCAGAGGATATGTTCAAGTTGCATGA |
| | CGAAATGACCGTTGAACATTTGGCTGGTAAGTTCCAAGCTATCTTCGATAGAAGATT |
| | GGCTGCTGATAAGAGGAAGTACTTGAAAAAGAGAAGGCAATTGGCCTTGAAGAAA |
| | GGTGATTCTGATGTTTCTGCTAGAACCGACGAAGATTTGATGTTGGAATACGAACC |
| | ATCTAAGTCCCTGTGTTTCTTGTCCTTGTACGAAACATTTTTGTGGCAATACTCCATG |
| | GCTTTGTTGTTCGGTATGTTGGGTTTAGTTGGTCAAGCTTGTAATCCTTTGTTGTCCC |
| | GTAAGTTGATTAACTTCGTTGAATTGGAAGCCTTGGGTATCCCAACAAAAATTGGTA |
| | CTGGTATTGGTTACGCTTTCGGTGTTGCTATTTTGATGTTTGTTTCCGACGTCTTGCA |
| | CAATCAAGGTGTTTATTTTGCTATGTTGACCGGTGCTCAAATTAGAGCTATTTTCACA |
| | AAAGCCCTGCTGGACAAGTCTTTCAAATTGAATACCAGATCGAGGAAGAAGTTCCC |
| | ACCATCTAAAATTACCTCCATCATGTCTACCGATGTTTCCAGAGTTGACTTAGGTACA |
| | GGTTTTTCTATCTACGGTTTCGTTTTGATCGTTCCAGTTGGTGTTTCCATTGGTATCTT |
| | GATCTACAACATTAAGGCTCCAGCTATGGTTGGTGTTGGTTTGATGTTAGCTTTCTT |
| | GTTCGTTTCTGGTGGTTTGTCTACCTTGTTGTTCTCTTTCAGAAAAACCGCTCAAAAG |
| | GCTACCGATTCTAGAGTTGGTTATATGAAGGAAGTGCTGAACAACCTGAAGATGAT |
| | CAAGTTTTACTCTTGGGAAAAGCCATACCATGCCTTGATTACTAAGATCAGACGTAG |
| | AGAAATGGCCTACTTGTTGAGAATGGAAATTACCCGTATGATCATTATTACCTTGGC |
| | TGCTTCTTTGGCCTTGGTTTCATCTTTGGTTTCTTTCTTGACGTTGTACGCTATTGCTT |
| | CTCCATCTTCTAGAAATCCAGCCGAAATTTTCTCCTCCGTTTCTTTGTTTAACTTGTTG |
| | GCCTCTCAATTCTTGGTCTTGCCATTGTCTATTGCTGGTTCTACTGATGCATTTTTGG |
| | GTATGAATAGAGTTGCTGCTGTTTTAGCTGCTGACGAAATTGATCCAGAAGATGCT |
| | GATACCATTTTGTCAGAAAGAGCACAAGCTTTGTTGGAAGAAAAGAAGTTGGCTAT |
| | CACTGTTCAAGACGGTGAATTCGAATGGGAGTTGTTTGATTTTGACGACGAAAAGT |
| | CTGAAGAAACCGAAGAACATAAGGACGAGTCCAAGAAAAAGAAGATGAAGAAAG |
| | AGTCGAAGAAGAAGGTCAAGAAGTCCACCAAAGATATCTCTGATACTTCTTCCGCTT |
| | CCTCCAATGAGAAAGAGAGAAAGTCTTTTAAGCTGCACAACGTGAACTTGGATATT |
| | AGACAAGGTGCCTTCGTTGTTATTACCGGTTCTATTGGTTCTGGCAAGTCATCTTTGT |
| | TGCATGCTTTGGATGGTGCCATGAAGAAATTGTCTGGTGATGTTTACGTTAACGGCT |
| | CTTTGTTGATGTGTGGTACTCCTTGGATTCAATCTGCTTCATTGAGAGAGAACATCTT |
| | GTTTGGTTCTACCTATGACGAAACCTGGTACAAAGAAGTTATTAGAGCTTGCTTCTT |
| | GGAGTCCGATTTCGATATTTTGCCAGCTGGTGATTTGACCGAAATTGGTGAAAGAG |
| | GTATTACTTTGTCCGGTGGTCAAAAAGCTAGAGTTTGTTTGGCTAGAACTGTTTACG |
| | CTAACTCCTCCATTATCTTGTTGGATGATGTTTTGTCTGCTGTTGATGCCAAGGTTGG |
| | TAAACATATTATGTCCGAATGCATCATGGGTATCTTAAAGGGTAAGACTAGAGTTTT |
| | GGCTACCCACCAATTGTCCTTGATTTCTGAAGCTGAACACGTCATTTTCTTGAATGGT |
| | GATGGTACTATCTCCAGGGGTACTTTTGAAGAATTGAAGTCTACCAACTCTGCCTTC |
| | AAGGCTTTGATGGAACATAACCGTAAATCCGAAGAAAACGATGAGGATGAATCTG |
| | AACCAGCATCCGAATTAGAAGTCTCCGAAAAAGAATTGATCAAGAGGCAATTGACT |
| | AAGCAGACTACTACCCAAGTTTCCTCTGATTCTGTTGAAAAGGTAGAATTGGATGGC |
| | AAGTTGTACGATGAAGAAGAAAAATCCGTTAACGCCATTGGTTGGGATGTTTATGG |
| | TCGTTACATTTTGACTGGTGTCCAAGGTTTTAAGTTCAACTGGTTGTTGTTTGTCATC |
| | CTGTGCTTGTGTATTTTGGGCACTTTTATGTCTCTGTTCACCAACAATTGGCTGTCTT |
| | TTTGGATCTCCAGAAAGTTTGATCAATCCGCCGGTTTTTACATTGGTTTCTACGCTAC |
| | TTTTACCGGTTTGGCTGTTATCTTGATGGTGTTCCAATTCTGCTCCATCATCTTCGTTA |
| | TGAACAGAGCCTCTAGGATCTTGAATATTAAGGCTTTGGGTAAGATCTTGCACGTCC |
| | CAATGTCTTTCATGGATACAACTCCAATGGGTAGAATCCTGAACAGATTCACTAAGG |
| | ATACTGACACCTTGGATAACGAAATCGGTGATAGAGTCGGTATGGTTGTTAACTTC |
| | ACTTTCGAAATTTGGGGCGTTATCATCATGTGCATTATCTACATGCCATGGTTTGCTA |
| | TTGCTGTTCCTTTTATCGTTGCCGTGTTCATTATTATGGCTAACTTCTATCAAGCCTCC |
| | GGTAGAGAAGTTAAGAGATTGGAAGCTGTTCAAAGATCCCACGTTTACAACAACTT |
| | CAACGAATCTTTAACTGGTATGCCAACCATTAAGGCCTTCAAGTCCATTCAGAGATT |
| | CTTGAACAAGAACATTGCCACGATCAACAAGATGGATGAGGCTTACTTTGTTACCGT |
| | TGCTAATCAAAGATGGTTGGACACTTACTTGTCTTTGTTGGCTACTTTGTTCGCCTTG |
| | TTGATTGCTTTGTTATGTGCTTGCAGAGTGTTCGATATTGGTGCTTCTGCAGTTGGTT |
| | TGTTAGTTTCCTACGTTCTGCAAATCTCCGGTTTGATTTCTATGTTGGTTGTCGTTTTC |
| | ACCCAAGTCGAACAAGATATGAATTCTGCTGAAAGAGTCCTGGATTACGTCTACAA |
| | AATTCCACAAGAAAGGCCATACGAAATCTCCGAAACTAGACCACCACCTGAATGGC |
| | CTCAAAATGGTGAAATTCAATTCATCAACGTCGACTTCGCTTACAGAGAAGGTTTGC |
| | CATTGACTTTGAGAAACATTAACGCCGATATTAAGCCACACGAAAAGATTGGTATTT |
| | GCGGTAGAACTGGTGCTGGTAAATCTTCAATTATGGTCGCTTTGTTCAGAATCGCCG |
| | AATTGACTTCTGGTTCCATTATGATTGATGGCATCGATGTTTCTACTTTGGGCTTGCA |
| | TGAATTGAGGTCCAACTTGTCTATTATTCCACAGGATCCAGTCTTGTTTAAGGGCAC |
| | TATTAGGTCTAATTTGGACCCATTTGAAACTAAGACCGATGACGAATTGTGGGATAC |
| | TTTAAGAAGGGCTGATATTATTGATGCCACCTCTTTGGAACATGTTAAGACTCAACG |
| | TGTTGGTGATGACGATTTCCATAAGTTCCACTTGGATAATGAGGTTGATGACGAAG |
| | GTGAAAACTTCTCTCTAGGTGAAAAACAATTGGTTGCTTTCGCTAGAGCTTTGGTTA |
| | GAGATACCAAGATTATCGTTTTGGACGAAGCTACCTCTTCTGTTGATTATGCTACTG |
| | ACTCTAAGTTGCAAAAGGCCATCGTTAGAGAATTTTCCGATAGAACCATATTGTGCA |
| | TTGCCCACAGATTGAAAACCATCTTGCATTACGATAGAGTCATCGTCATGGAACAG |
| | GGTGAAATCAAAGAATTCGATACTCCATCTCACCTGTACAACTCTACTGGTACTATTT |
| | TCAGACAAATGTGCGACAAGTCCGGCATCTCTAAAGAAGATTTTTACGAGTGGTAA |
| SEQ ID | MAELEKGDDAQPALQHRLCTPLLSKKVPPVPRDEDRPVHPKATNPFSWFFFTWLTPVL |
| NO: 966 | LRGYKRTLLPEDMFKLHDEMTVEHLAGKFQAIFDRRLAADKRKYLKKRRQLALKKGDSD |
| | VSARTDEDLMLEYEPSKSLCFLSLYETFLWQYSMALLFGMLGLVGQACNPLLSRKLINFV |
| | ELEALGIPTKIGTGIGYAFGVAILMFVSDVLHNQGVYFAMLTGAQIRAIFTKALLDKSFKL |
| | NTRSRKKFPPSKITSIMSTDVSRVDLGTGFSIYGFVLIVPVGVSIGILIYNIKAPAMVGVGL |
| | MLAFLFVSGGLSTLLFSFRKTAQKATDSRVGYMKEVLNNLKMIKFYSWEKPYHALITKIR |
| | RREMAYLLRMEITRMIIITLAASLALVSSLVSFLTLYAIASPSSRNPAEIFSSVSLFNLLASQF |
| | LVLPLSIAGSTDAFLGMNRVAAVLAADEIDPEDADTILSERAQALLEEKKLAITVQDGEFE |
| | WELFDFDDEKSEETEEHKDESKKKKMKKESKKKVKKSTKDISDTSSASSNEKERKSFKLH |
| | NVNLDIRQGAFVVITGSIGSGKSSLLHALDGAMKKLSGDVYVNGSLLMCGTPWIQSASL |
| | RENILFGSTYDETWYKEVIRACFLESDFDILPAGDLTEIGERGITLSGGQKARVCLARTVY |
| | ANSSIILLDDVLSAVDAKVGKHIMSECIMGILKGKTRVLATHQLSLISEAEHVIFLNGDGTI |
| | SRGTFEELKSTNSAFKALMEHNRKSEENDEDESEPASELEVSEKELIKRQLTKQTTTQVSS |
| | DSVEKVELDGKLYDEEEKSVNAIGWDVYGRYILTGVQGFKFNWLLFVILCLCILGTFMSL |
| | FTNNWLSFWISRKFDQSAGFYIGFYATFTGLAVILMVFQFCSIIFVMNRASRILNIKALGK |
| | ILHVPMSFMDTTPMGRILNRFTKDTDTLDNEIGDRVGMVVNFTFEIWGVIIMCIIYMP |
| | WFAIAVPFIVAVFIIMANFYQASGREVKRLEAVQRSHVYNNFNESLTGMPTIKAFKSIQR |
| | FLNKNIATINKMDEAYFVTVANQRWLDTYLSLLATLFALLIALLCACRVFDIGASAVGLLV |
| | SYVLQISGLISMLVVVFTQVEQDMNSAERVLDYVYKIPQERPYEISETRPPPEWPQNGEI |
| | QFINVDFAYREGLPLTLRNINADIKPHEKIGICGRTGAGKSSIMVALFRIAELTSGSIMIDG |
| | IDVSTLGLHELRSNLSIIPQDPVLFKGTIRSNLDPFETKTDDELWDTLRRADIIDATSLEHV |
| | KTQRVGDDDFHKFHLDNEVDDEGENFSLGEKQLVAFARALVRDTKIIVLDEATSSVDYA |
| | TDSKLQKAIVREFSDRTILCIAHRLKTILHYDRVIVMEQGEIKEFDTPSHLYNSTGTIFRQM |
| | CDKSGISKEDFYEW* |
| SEQ ID | ATGGCTTCCTCTTCTGCCTTGGAATCCAATCAATTGTCTTTGGAAAGACAGAAGAGG |
| NO: 967 | CTGTTGTCTTTCTTGATGTCTAAAAACGTTCCACCAGTGCCAACTCAAGAAGAAAGA |
| | AAACCATATCCAGGTGCTACTGCCAACGTTATTAAGCAAATTTTCTTTTGGTGGTTG |
| | GCCCCAGTTATGAATACTGGTTATCAAAGAACATTGCAGCCAGACGATATGTTCTAC |
| | TTGACCGATGATATCAAGGTTCAAAAGATGGCCGATGATTTCTACAGGTACATGTCC |
| | AACGATATCGACAGATCCAAGCAAAAACATATTGCTGCCAAGTGCAAAGAAAGAG |
| | GTGAAACTGTTGAAACCACTTCCGTTGATCCTGAAGAGGATTTGAAAGACTACGAG |
| | TTGTCTAAGTTCTTGACCGTTTGGGCTTTAGCTAAGACTTTTAAATGGCAGTATACCT |
| | GGGCTTGTGTTTGTTTGGCTTTGTCTAATGCTGGTCAAACTACTATGCCTCTGCTGTC |
| | TAAGAAGTTGATCAAGTACGTTGAATTGAAGGCTTATGGACAAGAACCAGGTATTG |
| | GTAAAGGTTTGGGTTACTCTTTTGGTACTACCGCCATGGTTTTTATCGTTGGTGTTTT |
| | GATCAACCACTTCTTCTACAGATCTATGATTACTGGTGCTCAAGCTAAAGCTGTTTTG |
| | ACTAAGGCTTTGTTGGACAAGTCCTTTAAGTTGTCTGCTGAAGCTAAACACAAGTAC |
| | TCCGTTGGTAAGATTACTTCCATGTTGGGTACTGACTTGTCTAGAATTGATTTCGCTT |
| | TGGGTTTCCAGCCATTCATTATCGTTTTCCCAATTCCAATTGCTATCGCCATTGCCATT |
| | TTGATCGTTAATATTGGTGTTGCCTCTTTGGTTGGTGTTGGTATTTTGTTGGTTTTCA |
| | TGGTTGGTATTGCTTTCTCTACCGGTAAGTTGATTGCTTACAGAAAGAAGGCTAACC |
| | ACTACACCGATTCTAGAGTCAACTACATCAAAGAAGCCCTGAACAACTTGAAGGTC |
| | ATCAAGTTTTATTCTTGGGAACCACCATACCACGAAAACATTTCTGACCTGCGTAAG |
| | AAAGAGATGAAGATCATCTACAGAATGCAGGTCTTGAGAAACGTTGTTACTTCTTTC |
| | GCTATGTCCTTGACTTTGTTCGCTTCTATGACTGCATTTTTGGTCTTGTACGCTATCTC |
| | CAATGGTAAAAGAGATCCAGCCTCTATCTTCTCCTCTTTGTCCTTGTATAACACTTTG |
| | ACCCAACAGGTTTTCTTGTTGCCAATGGCTTTGGCTACAGGTGCTGATGCTTTTATG |
| | GGTATTTCTAGAGTTGGTGACTTCATGTCCCAATCTGAAATCAATCCAGAAGAAAAC |
| | GCTATTGAAGCTCCACCAGATGTTCAAGAATGGATGGACAAAGAATCCTTGTCTATC |
| | GATGTTGAAGATGCCTCTTTCGAATGGGAAATTTTCGAAGATGATGAAGAGAAGGA |
| | CGGCAAGAATTCTAAGAAGAACGGTTCCAAAAAGAGGAAGTCCGAAGAAAACATC |
| | ATCTTGGATGTGCAAGACTCCGAATCTTCTTTGACAAAAGGTTTAGACGGCTCCTCT |
| | AGTTCTGAAGTTTCATCAGCTGAAGATGCTCACTTTGAAGGTTTGAACAACATCGAC |
| | TTCAAGATCAAGAAGGGTGAATTCGTTGTTATCACCGGTTTGATTGGTTCCGGTAAA |
| | TCATCTTTGTTGTCAGCTATGTCCGGTTTTATGAAGAGGACTTCTGGTTCCGTTAATG |
| | TCAATGGTAGTTTGTTGTTGTGTGGTTACCCTTGGGTTCAAAACTCTACTGTTAAGG |
| | ACAACATTATCTTCGGTTCCGAATTCGACGAAGAGAAGTACAAAAAGGTTATCTAC |
| | GCTTGCTCTTTGGAAGCTGACTTGGAATTATTGCCAGCTGGTGATAGAACTGAAATT |
| | GGTGAAAGAGGTATTACCTTGTCTGGTGGTCAAAAGGCTAGAATCAATTTGGCTAG |
| | AGCTGTTTACGCTAACAAGGACATCATTCTGTTGGATGATGTCTTGTCAGCTGTTGA |
| | TGCAAGAGTTGGTAAACACATTATGAACAACTGCCTGCTGGATCTGTTGAAAGAAA |
| | AGACAAGAGTTTTGGCTACCCACCAGTTGTCTTTAATTGGTTCTGCTGATAGAGTCA |
| | TCTTCTTGAATGGTGATGGTTCCATTGATGTCGGTACTTTCGAAGAATTGAAAGAGA |
| | GAAATCCAGGCTTCGATAAGTTGATGGCATACAACTCTGAATCCCATGAGGAAGAT |
| | GAAGAAGAAGAAGAGAACTTGGAAGAAATCGCTGAAGAGGACCTATTTGAAGATG |
| | ACAAGAGAGTTGTTGAAAGGCAGTTGACTAGAAGATCTACTAGAACTGTTACATCC |
| | GTTGGTGCTTTTCCCGAAGAAGAATACGACGAAGCAGATGAAGAGGCTAGACATC |
| | ATGAGTACAATTTGGATGAACAAGCCGACGGTAAATTGATCGGTGATGAAGAAAG |
| | AGCAGTTAACGCCATCTCTAAAGAAATCTACGCTAGGTACTTCGAACTAGGTTCTGG |
| | TAGATTGACTCCATGGGTTATGTTGCCTTTGCTGTTGTTTTTCATTGTCGTTGCTACC |
| | TTCTCTCAGATTTTCACTAATACGTGGTTGTCCTTTTGGACCGAGTACAAATTTGATA |
| | AGCCAGACAAGTTCTACATCGGCATCTATATTATGTTCGCCTTCCTGTCCTTCATCTT |
| | GTTGACCATTGAATTCATCATCCTGGTCAAGATTACCAACACTGCTTCTGTTATGATG |
| | AACGTTTTGGCCGTTAAGAAAGTTTTACATGCCCCAATGTCTTTCATGGATACCACTC |
| | CAATGGGTAGAATCTTGAACAGATTCACTAAGGATACCGATGTCTTGGATAACGAA |
| | ATCGGTGATCAATTGAGGTTCTTCTTGTACGTTTTCGCCAACATTATTGGTGTCGTTA |
| | TCTTGTGCATTATCTACTTGCCTTGGTTTGCTATTGCTGTCCCATTTTTGGGTATGCTG |
| | TTCGTTTCTATCTCTAACTACTATCAAGCTTCCGCCAGAGAAATCAAAAGATTGGAA |
| | GCAGTTCAAAGGTCCTTGGTCTACAACAATTTCAACGAAACTTTGTCTGGTATGGCT |
| | ACCATTAAGGCTTACAAAGCTACCGAAAGATTCATCGGTAAGAACAACTACTTGATT |
| | GACAGAATGAACGAGGCCTACTACATTACCATTGCTAATCAAAGATGGTTGGCCAT |
| | CCACATGGATTTTGTTGCTACTTTATTCGCCTTGCTGATTGCTTTGTTGTGCGTTAAT |
| | AGAGTGTTTAACGTTTCCGCTTCTGCTGTTGGTTTGATTTTGTCTTACGTCTTGCAAA |
| | TTGCCGGTCAGTTGTCTATGTTGATTAGAACTTTCACCCAGGTCGAAAACGAGATGA |
| | ATTCTGCTGAAAGATTGAACTCTTACGCTACCGATTTGCCAGTTGAAGCACCATATG |
| | TTATTACTGAAAACACTCCACCACCAAACTGGCCTACTCAAGGTAACATTACTTTCG |
| | ATCATGTTTCCTTGGCTTACAGACCAGGTTTGCCATTGGTTTTGAAGGACTTGAATTT |
| | CACTGTTAACCCCATCGAAAAGATCGGTATTTGTGGTAGAACTGGTGCTGGTAAAT |
| | CTTCTATTATGACTGCCTTGTACAGGTTGTCCGAATTGGATTCAGGTAGAATCGAAA |
| | TCGATGGTATCGACATTTCCAAGTTGGGTTTGAGAGATTTGAGGTCCAAGTTGTCCA |
| | TTATTCCACAAGATCCAGTTTTGTTCAGAGGTACTATCAGAACTAACCTGGATCCATT |
| | CAACGAACATGAAGATGATAGATTGTGGGATGCTTTGAGAAGAACAGGTTTGATC |
| | GAAGAATCCAGATTGGAGTCTGTTAAGAAGCAATCTAAGTCTACTACTAAGCCAGC |
| | TACCGGTGAAATTTCTGAAAAGACTACTGAAAAAGCTACTGCTACCCCAGATTCTTT |
| | GGCATTGCATAAGTTTCATTTGGATCAAGCCGTTGAGGATGATGGTTCTAATTTTAG |
| | CTTAGGTGAGAGACAGTTGATCGCTTTTGCTAGAGCTTTGGTTAGAGACTCCAAGA |
| | TTTTGATATTGGATGAAGCCACCTCCTCCGTTGATTACGAAACTGATTCTAAGATCC |
| | AAAAGACGATCATCAGGGAATTCAAGGATTGCACCATTTTGTGCATTGCCCATAGA |
| | TTGAAAACCATCTTGAACTACGACAGGATCTTGGTTTTGGATAAGGGTGAAGTCAA |
| | AGAATTCGATACTCCATGGAATTTGTTCAACGCCAGAGGTTCTATTTTCCAACAAAT |
| | GTGCGAAAGATCCAACGTTACCGAACAAGACTTTGCTTCTTCCGTTCAATTCTAA |
| SEQ ID | MASSSALESNQLSLERQKRLLSFLMSKNVPPVPTQEERKPYPGATANVIKQIFFWWLAP |
| NO: 968 | VMNTGYQRTLQPDDMFYLTDDIKVQKMADDFYRYMSNDIDRSKQKHIAAKCKERGE |
| | TVETTSVDPEEDLKDYELSKFLTVWALAKTFKWQYTWACVCLALSNAGQTTMPLLSKK |
| | LIKYVELKAYGQEPGIGKGLGYSFGTTAMVFIVGVLINHFFYRSMITGAQAKAVLTKALL |
| | DKSFKLSAEAKHKYSVGKITSMLGTDLSRIDFALGFQPFIIVFPIPIAIAIAILIVNIGVASLVG |
| | VGILLVFMVGIAFSTGKLIAYRKKANHYTDSRVNYIKEALNNLKVIKFYSWEPPYHENISD |
| | LRKKEMKIIYRMQVLRNVVTSFAMSLTLFASMTAFLVLYAISNGKRDPASIFSSLSLYNTL |
| | TQQVFLLPMALATGADAFMGISRVGDFMSQSEINPEENAIEAPPDVQEWMDKESLSI |
| | DVEDASFEWEIFEDDEEKDGKNSKKNGSKKRKSEENIILDVQDSESSLTKGLDGSSSSEV |
| | SSAEDAHFEGLNNIDFKIKKGEFVVITGLIGSGKSSLLSAMSGFMKRTSGSVNVNGSLLLC |
| | GYPWVQNSTVKDNIIFGSEFDEEKYKKVIYACSLEADLELLPAGDRTEIGERGITLSGGQK |
| | ARINLARAVYANKDIILLDDVLSAVDARVGKHIMNNCLLDLLKEKTRVLATHQLSLIGSA |
| | DRVIFLNGDGSIDVGTFEELKERNPGFDKLMAYNSESHEEDEEEEENLEEIAEEDLFEDD |
| | KRVVERQLTRRSTRTVTSVGAFPEEEYDEADEEARHHEYNLDEQADGKLIGDEERAVNA |
| | ISKEIYARYFELGSGRLTPWVMLPLLLFFIVVATFSQIFTNTWLSFWTEYKFDKPDKFYIGI |
| | YIMFAFLSFILLTIEFIILVKITNTASVMMNVLAVKKVLHAPMSFMDTTPMGRILNRFTKD |
| | TDVLDNEIGDQLRFFLYVFANIIGVVILCIIYLPWFAIAVPFLGMLFVSISNYYQASAREIKR |
| | LEAVQRSLVYNNFNETLSGMATIKAYKATERFIGKNNYLIDRMNEAYYITIANQRWLAIH |
| | MDFVATLFALLIALLCVNRVFNVSASAVGLILSYVLQIAGQLSMLIRTFTQVENEMNSAE |
| | RLNSYATDLPVEAPYVITENTPPPNWPTQGNITFDHVSLAYRPGLPLVLKDLNFTVNPIE |
| | KIGICGRTGAGKSSIMTALYRLSELDSGRIEIDGIDISKLGLRDLRSKLSIIPQDPVLFRGTIR |
| | TNLDPFNEHEDDRLWDALRRTGLIEESRLESVKKQSKSTTKPATGEISEKTTEKATATPDS |
| | LALHKFHLDQAVEDDGSNFSLGERQLIAFARALVRDSKILILDEATSSVDYETDSKIQKTII |
| | REFKDCTILCIAHRLKTILNYDRILVLDKGEVKEFDTPWNLFNARGSIFQQMCERSNVTE |
| | QDFASSVQF* |
| SEQ ID | ATGGACGACTCCTCTTTGGAAATTGGTAACGACTTGTACAAACCACAGAAGAGAAT |
| NO: 969 | TCTGACCTTCCTGTTCAGAAACAAGTTCTACCCAATTCCAAAGGACGACTCTGAAAG |
| | AAAAATCTACCCAGAGCAATCCTCCAACATCTTGTACAGAGTTTTCTTTTGGTGGGT |
| | GTCTCCATTGATGACTATTGGTTACACTAGAACCTTGCAACCAGATGATTTGTGGAT |
| | TTTGACCGAAGATATGAAGGTCGAACACTTCTACAACTACTTCGTTACTTACTTGCA |
| | GGTTGAAACTGAAAGAGCACATTTGGCTCATATTGCCAACAAGTGCAAAGAAAGAA |
| | ACGAATCCGTTGAGGACTCTTCCAAATCTAGAGAAGAAGATCTGCAAGACTTCGTC |
| | TTGTCTCCAATGAATATTGCTACCGTTTTGTTCTTGACCTTCAAGAGACAAATCTTGG |
| | TCGGTTTGATTTTGGCCATCTTTTCCTTGTCTGGTATTGCTTGTTCTCCACTGTTGACC |
| | AAAGAATTGATTAAGTTCGTCGAGAAGAGATCCTTGGGTGTTCATACAAATATTGG |
| | TCAAGGTATCGGTTACTCTTTGGGTGTTGTTTTCATGATGCTGTTCTCCAACTTGTTG |
| | TTCAACCACTTCATGTACATCGGTCAATCTATGGGTGCTTTGATTAAGGCTTTGTTGA |
| | CTAAGGCTGTTTTGAACAAGGCTTTCAAGTTCAACGCTGAATCCAGACATAAGTTCC |
| | CACAATCTAAGTTGACCTCCATTATTACCACCGATTTGTCCAGAGTTGAAATCGCTGT |
| | TATGTTCCAACCTTTGTTGTTGTGTTTGCCAATTCCTATTGCTATCGCCATCGTTATCT |
| | TGGTTGTTAACATTAGAGTTTCCGCCGTTATCGGTATTGTCATCTTCATTATTTTCTTG |
| | GGCTTCATCTCCATTGGTGCCAAAAAGTTGTTTGCTTACAGAGATGCCGTTTCCAAG |
| | ATTACTGATAAGAGGGTCAATTTCATGAAGGAAATCCTGAACAACCTGAAGATGAT |
| | CAAGTTTTACTCTTGGGAACATCCATACCACGAAAACGTATGTAGAGTTAGAGGTG |
| | AAGAGGTTGACATGATCTTGAAGATTCAAACCTTGAGGAACGTGATTTTCTCTTTGG |
| | CTATGACTTTGACCGGTATCTGTTCTATGATTGCTTTCGTCATCTTGTATGCTATCCA |
| | GGGTTCTACATCTTCTCCAGCTAAAATGTTTTCCTCCGTTTCCACCTTTGAAATCTTG |
| | GGTTTGATGGTTTTCTTCATCCCACAAGCTTTGTCTACTACTGCCGATATGATTAACG |
| | GTTTCAAGAGAATTGGTGCTGTTTTGTCTGCTGATGAAGAGGAACCATACGAAGGT |
| | TACAGAGAATTGAATGATGCTTCCGATAAGAGAGCTATTGCTTTGAAAGATGCCTCT |
| | TTCTCTTGGGATGTTTTCGATGACGAAGAAGGCGAAGAGGACGAAGCTGATGGTG |
| | ACGGTGATGGTGATGAAGAAGAAGAAATTGAAGATAAGAAGGACAAGAAAAAGG |
| | CCAAGAAAGAGAAGAAGCGTAAAGAGAAAGGTAAGGACACTAAGTCTAGTTTCCC |
| | ATCTACCTCTTCCAACGATATTGAGTTGTCTACCATTCCAAAGACCTCTCCAAATTCT |
| | AAGGCTAACAACAAGGGTGAACAAGAAGAAGCTACTTCATTTCCAGGTTTGAAGAA |
| | CATCGATTTGACCATTCATAAGGGTGAGTTCATCGTTATTACTGGTTTGGTTGGTTC |
| | CGGTAAGTCATCTTTGTTATCTGCTATTGCTGGTTTCATGTCTTGCGATTCTGGTGAA |
| | GTTGATATTAACGGTCCATTGCTATTGTGTGGTGCTCCATGGATTCAAAACAATACC |
| | ATCAGAGAGAACATCGTTTTCGGTAAGCCATTCGACCAAGAATATTACGATAAGGT |
| | TATCTACGCTTGCGCCTTGAACATTGATTTGGATTCTTTGGAAGGTGGTGATTACAC |
| | TGAAGTTGGTGAAAAGGGTATTACTTTGTCTGGTGGTCAAAAGGCTAGAATCAATT |
| | TGGCTAGAGCTGTTTACGCCAACAAAGAAATCATCTTGATGGACGATGTTTTGTCAG |
| | CAGTTGATGCTAGAGTTGGTAAGCACATTCTAAACAACTGCTTTTTGGGTTTGTTGG |
| | GCTCTAAGACTAGAGTTTTGGCTACTCATCAATTGTCCTTGATTGGTTCTGCTGACA |
| | GAATCGTTTTCTTGAATGGTGATGGTTCTATCGATGTTGGTAAGATGGATGAATTGA |
| | TCGCCAGAAACAACGACTTTAACCAGTTGATGAAGTTCTCTAAGTTGGAGGACATT |
| | GAGGAAGAAAACTTGGACGTTGAAGTTGAAGAAATCGTTGACGAAATTGACTTGG |
| | GCAACAAAGAATCTAAGGACTCTGGTGAAATCGTGTCCGTTTTCTCTCAAAATCAAT |
| | CCGGTATTGACACCTCTCAAGAATTGACTAGACGTAGAACCAGAATCTTCTCAAAGT |
| | CCGATTCTGACAACAACGACAGCATGGAAGATAATGATGTTGAGTACAAGGACTAC |
| | AACCATAACAAGGATGCTACCAAGGGTAAGATTATCACAGAAGAAGAGAGAGCCG |
| | TTAACTCCATCAAGTTTGATGTTTACCACAAGTACTTAAAGTACGGTGCTGGTAAAT |
| | TGACTCCATGGGGTTTCTTTACTATTTTCGCTGTCTTGTTGACTTTGGCTACCTTCTGT |
| | GACATTTTCACTAACACTTGGTTGTCTTTCTGGATCGAACAAAAGTTCGACGGTAAA |
| | TCCAACGGTTTCTACATTGGTTTCTACGTCATGTTCAATGTCTTGTGGGTTATCTTCTT |
| | GACTTACACCTTCGTGTTCTTCATTCATGGTACTACCGTTTCTTCTAAGCACTTGAATT |
| | TGATGGCCATTAAGAGAATCTTGCATGCCCCAATGTCTTTCATGGACACTACTCCAA |
| | TGGGTAGAATTTTGAACAGATTCACCAAGGATACCGATGCCTTGGATAACGAAATT |
| | TCTGATAACCTGAGGTTGTTCTTCACCGCTATTGCTAAAATGATCGGCGTGTTCATTC |
| | TGATCATCATCTATTTGCCATGGTTCGCTTGTGCTATTCCAGGTATTTTCGTGCTGTT |
| | CTTCTTGATTGCTAACTTCTACCAAGCCTCTAACAGAGAAGTTAAGAGATTGGAAGC |
| | CATCTTGAGATCCTTCGTTTACAACAACGTTAACGAAGTCCTATCCGGTATGAATAC |
| | CATTAAGGCCTATAAGGATGAATCCAGGTTCGCTGATTTGGGTGATTTGTTATTGAA |
| | CAAAGCTAACGAAGCCTCCTTCGTTGTTAACGCTAATCAAAAATGGTTGGGTATCCA |
| | GTTGGATTTGTTGGCTGAATTGATTGTCTTGATCGTGTCCTTGTTGTGTGTTAACAG |
| | AGTGTTCTCTATTAACGCTGCTGCTGTTGGTTTGTTGATGACTTATACTTTACAAGTC |
| | GCCAACGAGCTGTTGAATTTGGTTAGAACTTTCACCTTGGTGGAAAACGATATGAA |
| | CTCCGCCGAAAGAATTATTCATTACGCCTTGAAAGTTGAACAAGAGGCCCCATACAA |
| | AATCGATTCTTCTCAACCACCACCAGATTGGCCACAATATGGTGCAGTTGATTTCAA |
| | GAACGTCAACATGAAGTATAGACCAGGTTTGCCATTGGTTTTGAAGGACTTCTCATT |
| | GAAGATTGCCCCTATGGAAAAGATTGGTATTTGTGGTAGAACTGGTGCCGGTAAAT |
| | CTTCTATTATGACTGCCTTGTATAGGATCTCCGAATTGGATTCAGGTTCCATCAGAAT |
| | TGATGACGTTGATATTGCCACTATCGGCTTGAAAGATTTGAGATCCCATTTGTCCAT |
| | CATTCCACAAGATCCAGTTTTGTTCAACGGCACTATCAGATCTAATTTGGATCCATTT |
| | GGTGAACAACCAGACGACGTTTTGTGGGAATCTTTAAGAAGATCAGGTATCTTGAC |
| | CACCGAAGAAGTTGCTAAAGCTAGAGCTATTTCCAAGGATTCTATTACTGCTGCTTC |
| | TGGTGGTAAAGAAGGTTCAGAAGTTGAATCACAAGAAGTCGAATTGCCAAAGTTCC |
| | ACTTGTATCAACCTGTTGAAGATGAAGGTGAGAATTTCTCATTGGGTGAAAGACAG |
| | TTGATCTCTTTTGCTAGAGCTTTGGTCAGAAACGCCAAGATCATTATATTGGATGAA |
| | GCCACCTCTTCCGTTGATTATGGTACTGATGACAAAATCCAAACCACTATCGCACAA |
| | GAATTCAAGTCCTGTACCATTTTGTGCATTGCCCACAGATTGAAAACGATCATCAAC |
| | TACGATAAGATCCTGGTTATGGATAAGGGTTCCGTTAGAGAATTTGATACTCCATG |
| | GAACCTATTCAACTCAAACGGTTCTGTTTTCAGGGAAATGTGCGAAAAGTCTAACAT |
| | AGTTGCTGAGGACTTTAAGAGGCGTTGA |
| SEQ ID | MDDSSLEIGNDLYKPQKRILTELFRNKFYPIPKDDSERKIYPEQSSNILYRVFFWWVSPLM |
| NO: 970 | TIGYTRTLQPDDLWILTEDMKVEHFYNYFVTYLQVETERAHLAHIANKCKERNESVEDSS |
| | KSREEDLQDFVLSPMNIATVLFLTFKRQILVGLILAIFSLSGIACSPLLTKELIKFVEKRSLGV |
| | HTNIGQGIGYSLGVVFMMLFSNLLFNHFMYIGQSMGALIKALLTKAVLNKAFKFNAESR |
| | HKFPQSKLTSIITTDLSRVEIAVMFQPLLLCLPIPIAIAIVILVVNIRVSAVIGIVIFIIFLGFISIG |
| | AKKLFAYRDAVSKITDKRVNFMKEILNNLKMIKFYSWEHPYHENVCRVRGEEVDMILKI |
| | QTLRNVIFSLAMTLTGICSMIAFVILYAIQGSTSSPAKMFSSVSTFEILGLMVFFIPQALST |
| | TADMINGFKRIGAVLSADEEEPYEGYRELNDASDKRAIALKDASFSWDVFDDEEGEEDE |
| | ADGDGDGDEEEEIEDKKDKKKAKKEKKRKEKGKDTKSSFPSTSSNDIELSTIPKTSPNSKA |
| | NNKGEQEEATSFPGLKNIDLTIHKGEFIVITGLVGSGKSSLLSAIAGFMSCDSGEVDINGP |
| | LLLCGAPWIQNNTIRENIVFGKPFDQEYYDKVIYACALNIDLDSLEGGDYTEVGEKGITLS |
| | GGQKARINLARAVYANKEIILMDDVLSAVDARVGKHILNNCFLGLLGSKTRVLATHQLSL |
| | IGSADRIVFLNGDGSIDVGKMDELIARNNDFNQLMKFSKLEDIEEENLDVEVEEIVDEID |
| | LGNKESKDSGEIVSVFSQNQSGIDTSQELTRRRTRIFSKSDSDNNDSMEDNDVEYKDYN |
| | HNKDATKGKIITEEERAVNSIKFDVYHKYLKYGAGKLTPWGFFTIFAVLLTLATFCDIFTNT |
| | WLSFWIEQKFDGKSNGFYIGFYVMFNVLWVIFLTYTFVFFIHGTTVSSKHLNLMAIKRIL |
| | HAPMSFMDTTPMGRILNRFTKDTDALDNEISDNLRLFFTAIAKMIGVFILIIIYLPWFACA |
| | IPGIFVLFFLIANFYQASNREVKRLEAILRSFVYNNVNEVLSGMNTIKAYKDESRFADLGD |
| | LLLNKANEASFVVNANQKWLGIQLDLLAELIVLIVSLLCVNRVFSINAAAVGLLMTYTLQ |
| | VANELLNLVRTFTLVENDMNSAERIIHYALKVEQEAPYKIDSSQPPPDWPQYGAVDFKN |
| | VNMKYRPGLPLVLKDFSLKIAPMEKIGICGRTGAGKSSIMTALYRISELDSGSIRIDDVDIA |
| | TIGLKDLRSHLSIIPQDPVLFNGTIRSNLDPFGEQPDDVLWESLRRSGILTTEEVAKARAIS |
| | KDSITAASGGKEGSEVESQEVELPKFHLYQPVEDEGENFSLGERQLISFARALVRNAKIIIL |
| | DEATSSVDYGTDDKIQTTIAQEFKSCTILCIAHRLKTIINYDKILVMDKGSVREFDTPWNL |
| | FNSNGSVFREMCEKSNIVAEDFKRR* |
| SEQ ID | ATGTCCACCACCTCCATCATTTCTGAAAAGGGTCATAACTCTAGAGACTC |
| NO: 971 | CGGTGTTGAAAACGATATTAGAGATTTGGCTAGAGCTTTCACTAACGCCT |
| | CTTCTATTACTTATCCAATGACTGGTGGTGACACCTCTTCATTGAATTCTA |
| | AAGCTCCAGTTAACCCAGTCTTGACCAATTACGAATCCGATGATTACATCC |
| | CAAAGTTGGACCCAAATTCCGATGAATTCTCATCCATTGAATGGGTCAGA |
| | AACCTGTCCAAGTTGATTTTGAATGCTCCAGAACATTACAAGCCATACACT |
| | TTGGGTTGTACTTGGAAGAATTTGAGAGCTTTTGGTTCCTCTGCTGATGTT |
| | GCTTATCAATCTACTGTTGCCAACATTCCAAAGAAGTTGTGCGAATTCTTC |
| | TACAGAAAGTGCCATAAGGCTAACGAGGATAACAACATCGATATCTTGAA |
| | ACCTATGGACGGTTTGATTGAACCAGGTGAATTATTGGTTGTTTTGGGTA |
| | GACCAGGTTCTGGTTGTACTACTTTGTTGAAGTCCATTTCCTCTAACACTC |
| | ACGGTTTCAAGTTGGACTCTAACTCTATCGTTGAATACGATGGTATTTCCC |
| | CAGAAGAGATCAAAAAGCACTATAGAGGTGAAGTTGTTTACAACGCTGAA |
| | GCCGATGTTCATTTTCCACATTTGACTGTTTTCGAAACCTTGAACACCATT |
| | GCTTTGTTGTCTACTCCATCCAATAGAATCCCAGGTGTTTCTAGAACTGCT |
| | TTTGCTAAACATTTGACCGAAGTTGTTATGGCTACTTACGGTTTGTTGCAT |
| | ACCAGAAACACTAAGGTTGGTAACGAATTGGTTAGAGGTGTTTCAGGTGG |
| | TGAAAGAAAGAGAGTTTCTATTGCCGAAGTTTCCATTTGCGGTTCTAAATT |
| | GCAATGTTGGGATAACGCTACTAGAGGTTTGGATTCTGCTACTGCTATGG |
| | AATTTGTTAAGGCTTTGAGAACCTCTGCCAGAATGATGAAGTCATCTTCTG |
| | CTGTTGCTATCTACCAATGTTCTCAAGAAACCTACAACTTGTTCGATAAGG |
| | TTTGCGTCTTGTACGAAGGTAGACAAATCTATTTCGGTTCTGCTAACGAAG |
| | CCAAGCAATACTTTGAAGAGTTGGGTTACATTTGCCCAGAAAGACAAACT |
| | ACCGCTGATTTCATTACTGCTGTTACTTCTCCAGGTGAAAGGATTGCAAAC |
| | GAAAACAAGAAGTTCGTTCCATCCACTGCTGAAGAAATGGAAAAACATTG |
| | GAAGAACTCCGAACAGTACAGACACTTGTTGTCCAAAATTGAAAAGAGAC |
| | AGAACGAGGACAACTCCGGTAAAAAGACTGATTTGAGAAAAGGTCATGTC |
| | GCCAGACAATCTCATAGAGCTAGAGCATCTTCTCCATTCATCGTTTCTTAT |
| | TGGCTGCAGGTTAAGTACTTGTTGGAAAGAAACTTCCAGAGGATCAGAAA |
| | CTCTATTGGTTTGACCTTGTTCTTGGTCTTGGGTAACTCTTCTATGTCTTT |
| | GTTGTTGGGCTCTATGTTCTACAAGGTTTTGAAGCACGATAATACTGCTG |
| | GCTTGTATTCTAGAGCTGCTGCTTTGTTTTTCGCCGTTTTGTTTAATGCTTT |
| | CAGCTGCATGTTGGAAGTTTTGGCCTTGTATGAATCCAGACCAATCATTG |
| | AAAAGCACAAGAGGTACAGCTTGTATCATCCTTCAGCTGATGCTTTGGCC |
| | TCTATTATTAGTGAAATCCCATCTAAGTTGGTCACCGCTGTTTTCTTTAACA |
| | TCGTGTTCTACTTTCTGTGCAACTTCAAAACTGATGCTGGTGCTTTCTTCT |
| | TCTACTTCATGATGTCTTTGATTGCCACCTTCGTTATGTCCCATATTTTCAG |
| | ATGTATTGGTTCCGCTACTAAGACTTTGGCTCAAGCTATGGTTCCAGGTT |
| | CAGTTTTGTTGTTAGCTATGTCTATCTACACCGGTTTCGCTATCCCAAAGA |
| | CTAAGATTTTGAGATGGTCTAAGTGGATCTGGTACATTAACCCATTGGCCT |
| | ACATTTTCGAATCCATGATGGTTAACGAATTCCACGATCATAACTTCGAAT |
| | GCTCTGAGTATATTCCAAGAGGTCCAGGTTACCATAACATCTCTGGTACT |
| | GAAAGAGTCTGTTCTTCTATTGGTGCTAAGCCTGGTGAAAATTTTGTTGAT |
| | GGTGAGTTGTACATCAACGCCTCATATGGTTATTATCATGGTCACAAATG |
| | GCGTGGTTTCGGTATTGGTTTAGCTTACGCTATTTTCTTCTTGGGCCTGTA |
| | CTTGGTTATTACCGAATTCAACGAATCCGCTAAGCAAAAGGGTGAAATCTT |
| | GGTTTTTAGACAGTCCACCTTGAAGAACAACACTAAGAAAACCAGGTACA |
| | TCTCCGATTTGGAATCTGGTGGTGGTGCTGCTTCTACATCAGAAAAGAAT |
| | TTGGTTGATGACTCTGGTGATAACGGTTTGGGTTCCATTAGACAGATCGA |
| | ATTGTCTAAGTCCGAAGCCATTTTTCATTGGAGAAACGTTTGTTACGATGT |
| | CGTTGTCAAAGGTGAAACTAAGAGAATCTTGAACGGTATTGATGGTTGGG |
| | TTAAGCCAGGTACTTTGACTGCTTTGATGGGTGCTTCTGGTGCTGGTAAA |
| | ACTACTTTATTGGATTGCTTAGCTTCCAGAGTTACCTCTGGTGTTATTACT |
| | GGTGATATCTTCGTTAACGGTCACTTGAGAGATTCTTCATTCGCTAGATCA |
| | ATTGGTTACTGTCAACAACAAGACTTGCATTTGGAAACTGCTACCGTTAGA |
| | GAATCCTTGAGATTTGCTGCTTATTTGAGACAGCCAAGATCCGTTAGTATC |
| | GAATCTAAGAACAGATACGTCGAGTCCGTTATCAACATCTTGGAAATGAA |
| | GCAATACGCTGATGCTATCGTTGGTGTTAGTGGTGAAGGTTTGAATGTCG |
| | AACAGAGAAAAAGATTGACCATCGGTGTAGAATTGGCTGCTAAACCTAAG |
| | TTGTTGGTCTTTTTGGATGAACCTACTTCTGGTTTGGATAGTCAAACTGCT |
| | TGGTCTATTTGCCAGTTGATGAGAAAATTGGCTGATCACGGTCAAGCTGT |
| | TTTGTGTACTATTCACCAACCTTCCGCTTTGCTGTTGCAAGAATTCGATAG |
| | GTTGTTGTTCCTACAAAGAGGTGGTCAAACAGTTTACTTTGGTGATTTGG |
| | GTGAAAGATGCCAAACCATGATTAGGTACTTCGAAAAGAATGGTGCTCAT |
| | CAATGTCCAAAGGATGTTAATCCAGCAGAATGGATGTTAGAAGTTATTGG |
| | TGCAGCTCCAGGTTCTCATGCTGATCAAGATTACCATGAAGTTTGGAAGG |
| | GTTCTGAAGAATGTACTGCTACTCAAGCTGAATTGGAATGGATGGAAAAA |
| | GAATTGGGTAAGAAGCCACAAGACAACTTGGAAAGAGGTGAATTTGCTTC |
| | CTCACTGTTGTCCCAATACTTTTTGGTTACTAAGAGGCTGTTCCAACAGTA |
| | TTGGAGAACACCATCTTACTTGTGGTCTAAGGCTATCTTGACTTTGTTCTC |
| | CCAAATCTTCATCGGTTTCACTTTCTTTAAGGCCGACAGATCATTGCAAGG |
| | TCTGCAAAATCAAATGCTGTCCGTTTTCATGTTCACCGTTGTTTTTAATCCT |
| | GCCGTGCAACAATATTTGCCAACCTATATTTCTCAGAGGGACTTATACGAA |
| | GCTAGAGAAAGACCATCTAAGACCTTTTCATGGATTGCCTTCATTTTGTCC |
| | CAAATTACCGTTGAAATTCCTTGGAACTTCGGCATTGGTACATTGGGTTTC |
| | TTGTGTTACTATTACCCAGTCTCTTTCTACCGTAATGCTTCTTTTGCCAATC |
| | AATTGCATGAGAGAGGTGCTTTGTTCTGGTTATTCTGTACAGCTTTCTACG |
| | TTTTCACTGGTTCTATGGCTCAATTGTGTGTTGCTGGTCAAGAAGTTGCTC |
| | AATCTGCTGGTCATATTGCTAGCTTGTTGTTTGTCTTGTCCTTGTCTTTTTG |
| | CGGTGTTATGGTTGCTCCAAAGAATATGCCAGGTTTTTGGAAGTTCATGT |
| | ACAGAGTTTCTCCACTGACTTACTTCATCGATGGTGTTTTGTCTACTGGTA |
| | TTGCCAACTCTAAGGTTGAATGTTCCGATTACGAATTTGTCACTTTCACTC |
| | CAAGATCTGGTCAAACTTGTGGTGAGTATATGTCCTTGTATATTGATGCTG |
| | CTGGTACTGGTTACATGAAGGATTCTGATTCTACCACCAAGTGTTCTTTTT |
| | GTCCAGCTTCTTCCACTAACGTGTTCTTGAAAATGGTGTCCTCTAATTACT |
| | CTCACAGATGGCGTAACTACGGTATCTTTTTGTGCTACATTTGCTTCAACG |
| | TTTTCGCTGCAGTTTTCTTGTACTGGTTGGCAAGAGTTCCTAAAAGAAAGG |
| | CTATGGTTACCGATAAGAGAAAGCCAACTGCTAAGAAGTGA |
| SEQ ID | MSTTSIISEKGHNSRDSGVENDIRDLARAFTNASSITYPMTGGDTSSLNSKAPVNPVLTN |
| NO: 972 | YESDDYIPKLDPNSDEFSSIEWVRNLSKLILNAPEHYKPYTLGCTWKNLRAFGSSADVAY |
| | QSTVANIPKKLCEFFYRKCHKANEDNNIDILKPMDGLIEPGELLVVLGRPGSGCTTLLKSI |
| | SSNTHGFKLDSNSIVEYDGISPEEIKKHYRGEVVYNAEADVHFPHLTVFETLNTIALLSTPS |
| | NRIPGVSRTAFAKHLTEVVMATYGLLHTRNTKVGNELVRGVSGGERKRVSIAEVSICGS |
| | KLQCWDNATRGLDSATAMEFVKALRTSARMMKSSSAVAIYQCSQETYNLFDKVCVLY |
| | EGRQIYFGSANEAKQYFEELGYICPERQTTADFITAVTSPGERIANENKKFVPSTAEEME |
| | KHWKNSEQYRHLLSKIEKRQNEDNSGKKTDLRKGHVARQSHRARASSPFIVSYWLQVK |
| | YLLERNFQRIRNSIGLTLFLVLGNSSMSLLLGSMFYKVLKHDNTAGLYSRAAALFFAVLFN |
| | AFSCMLEVLALYESRPIIEKHKRYSLYHPSADALASIISEIPSKLVTAVFFNIVFYFLCNFKTD |
| | AGAFFFYFMMSLIATFVMSHIFRCIGSATKTLAQAMVPGSVLLLAMSIYTGFAIPKTKILR |
| | WSKWIWYINPLAYIFESMMVNEFHDHNFECSEYIPRGPGYHNISGTERVCSSIGAKPGE |
| | NFVDGELYINASYGYYHGHKWRGFGIGLAYAIFFLGLYLVITEFNESAKQKGEILVFRQST |
| | LKNNTKKTRYISDLESGGGAASTSEKNLVDDSGDNGLGSIRQIELSKSEAIFHWRNVCYD |
| | VVVKGETKRILNGIDGWVKPGTLTALMGASGAGKTTLLDCLASRVTSGVITGDIFVNGH |
| | LRDSSFARSIGYCQQQDLHLETATVRESLRFAAYLRQPRSVSIESKNRYVESVINILEMKQ |
| | YADAIVGVSGEGLNVEQRKRLTIGVELAAKPKLLVFLDEPTSGLDSQTAWSICQLMRKL |
| | ADHGQAVLCTIHQPSALLLQEFDRLLFLQRGGQTVYFGDLGERCQTMIRYFEKNGAHQ |
| | CPKDVNPAEWMLEVIGAAPGSHADQDYHEVWKGSEECTATQAELEWMEKELGKKP |
| | QDNLERGEFASSLLSQYFLVTKRLFQQYWRTPSYLWSKAILTLFSQIFIGFTFFKADRSLQ |
| | GLQNQMLSVFMFTVVFNPAVQQYLPTYISQRDLYEARERPSKTFSWIAFILSQITVEIPW |
| | NFAIGTLGFLCYYYPVSFYRNASFANQLHERGALFWLFCTAFYVFTGSMAQLCVAGQEV |
| | AQSAGHIASLLFVLSLSFCGVMVAPKNMPGFWKFMYRVSPLTYFIDGVLSTGIANSKVE |
| | CSDYEFVTFTPRSGQTCGEYMSLYIDAAGTGYMKDSDSTTKCSFCPASSTNVFLKMVSS |
| | NYSHRWRNYGIFLCYICFNVFAAVFLYWLARVPKRKAMVTDKRKPTAKK- |
| SEQ ID | ATGGAATTCGAGCCAAAGTCCGAAGGTTCTTTGCCATCTTATGAAGGTTT |
| NO: 973 | GGATAAGTCCGCTGAAGTTCAAGTTCAAAGATTGGCTCATGGTGTTAACC |
| | CAATTCATGAAGGTGCTCCACAATTGGATCCTAACTCTTCTGATTTTTCAT |
| | CCAAAGCCTGGATTCAGAATATGGCCAATTTGTCATCTGAAGATCCAGAT |
| | CATTTCAAGCCATACCAAGTTGGTTGTTGTTGGAAAGATTTGGCTGCTTCT |
| | GGTGCTTCTGCTGATGTTGCTTATCAAACTACTGTTGAAAACTTGCCATGG |
| | AAGGTTTTGTTCTGGATCTATAGAAAATTGAGGCCCACCAGAAAGTCCGA |
| | TATTTTCCAAATTTTGAAGCCAATGGATGGTGCTTTGGATCCAGGTGAAGT |
| | TTTGGTTGTTTTAGGTAGACCAGGTTCTGGTTGTACTACTTTGTTGAAGTC |
| | TATTGCCTCTAACACCCACGGTTTTAACATTGCTAAGGATTCCACCATTTC |
| | CTACTCTGGTTTGTCTCCAAAGGATATCAACAGACATTTTAGAGGTGAAGT |
| | CGTTTACAACGCCGAAACCGATATTCATTTGCCACATTTGACTGTCTACCA |
| | AACCTTGTTGACTGTGTCTAGATTGAAAACTCCACAGAACAGAATCAAGG |
| | GTGTTGATAGAGAAACTTGGGCTAGACATATGACCGATGTTGTTATGGCT |
| | ACTTATGGTTTGTCCCATACCAAAAACACAAAGGTTGGTGGTGATTTGGTT |
| | AGAGGTGTTTCAGGTGGTGAAAGAAAGAGAGTTTCTATTGCCGAAGTTAC |
| | CATTTGCGGTTCTAAGTTTCAATGTTGGGATAACGCTACCAGAGGTTTAG |
| | ATGCTGCTACTGCTTTGGAATTCATTAAGGCTTTGAGAACCCAAGCTGATA |
| | TTTTGGCTTCTACTGCTTGTATTGCTATCTACCAATGTTCCCAAAACGCCT |
| | ACGATTTGTTCGATAAGGTTTGTGTCTTGTACTCCGGTTACCAAATTTTCT |
| | TTGGTTCTGCTGGTGATGCCAAGAGATACTTTGAAGAAATGGGTTACCAT |
| | TGTCCATCCAGACAAACTACAGCTGATTTCTTGACTTCTGTTACTTCTCCA |
| | GCTGAAAGAACTGTTAACAACGAGTACATTGAAAAGGGTATCCACGTTCC |
| | AGAAACTCCAGAAGAAATGTCTGATTATTGGAGGAACTCTCAAGAGTACA |
| | GAGACTTGCAAGAACAGATCCAAAACAGATTGGATCAGAACCATGAAGAA |
| | GGTTTGAGAGCCATCAAAGAATCTCATAATGCTGCCCAATCTAAGAGGAC |
| | TAGAAGATCATCTCCATACACTGTTTCTTACGGTATGCAGATCAAGTACCT |
| | GTTGATTAGAAATATGTGGCGTATCAAGAACTCCTCCGGTATTACCATTTT |
| | TCAGGTTTTCGGTAATTCCGTCATGGCCTTGTTGTTAGGTTCTATGTTTTA |
| | CAAGGTCCTGAAGCCATCTTCTACTGATACTTTTTACTATAGAGGTGCCG |
| | CTATGTTCTTCGCCATTTTGTTTAATGCTTTCAGCTCCTTGTTGGAGATCTT |
| | CTCATTATATGAAGCCAGACCAATCACCGAAAAGCACAGAACTTATTCCTT |
| | GTATAGACCTTCCGCTGATGCTTTTGCTTCTGTTTTGTCTGAAATTCCACC |
| | AAAGATCGTTACCGCTATTTGTTTTAATGTCGCCTTGTACTTCTTGGTCCA |
| | CTTTAGAGTTGATGCTGGTAGATTCTTCTTCTACTTCCTGATTAACATCCT |
| | GGCCATCTTTTCCATGTCTCATATGTTTAGATGTGTCGGCTCTTTGACTAA |
| | GACTTTGACTGAAGCTATGGTTCCAGCCTCTATCTTGTTATTGGTTTTGTC |
| | TATGTACACGGGTTTCGCTATTCCAAAGACTAAGATGTTAGGTTGGTCTAA |
| | GTGGATCTGGTACATTAACCCATTGTCCTACTTGTTCGAAGCCTTGATGG |
| | TTAACGAATTCCACGACAGAAACTTCTCTTGCACTTCTTTTATTCCAATGG |
| | GTCCAGGTTACCAATCAGTTTCTGGTACTCAAAGAGTTTGCGCTGCAGTT |
| | GGTGCTGAACCAGGTCAAGATTATGTTTTGGGTGATAACTACATCAAGCA |
| | GTCTTACGGTTACGAAAACAAACATAAGTGGCGTGCATTTGGTGTTGGAA |
| | TGGCTTATGTTATCTTTTTCTTCTTCGTGTACCTGTTCTTGTGCGAAGTTAA |
| | TCAAGGTGCTAAGCAAAACGGTGAGATTTTGGTTTTTCCACAATCCGTTGT |
| | CAGAAAGATGAGAAAGCAGAAGAAAATCTCTGCCGGTTCTAACGATTCTT |
| | CTGATCCTGAAAAGACCATCGGTGTTAAGGTTAATGATTTGACTGATACG |
| | ACGCTGATCAAGAATTCTACAGATTCATCCGCCGAACAGAACCAGGATAT |
| | TGGTTTGAACAAATCCGAAGCCATTTTCCATTGGAGAAACGTTTGTTACGA |
| | TGTCCAAATCAAGTCCGAAACCAGAAGAATTTTGGATAACATTGATGGTTG |
| | GGTCAAGCCAGGTACTTTAACTGCTTTGATGGGTGCTACTGGTGCTGGTA |
| | AAACTACTTTATTGGATTCCTTGGCTCAAAGGGTTACTACTGGTGTTTTGA |
| | CTGGTTCCATTTTCGTTGACGGTAAATTGAGAGATGAATCCTTCGCTAGAT |
| | CTATCGGTTACTGTCAACAACAAGACTTGCATTTGACTACTGCTACCGTTA |
| | GAGAAAGCTTGTTGTTTTCAGCTATGTTGAGACAACCTAAGTCTGTTCCAG |
| | CTTCTGAAAAGAGGAAATACGTTGAAGAAGTCATCAACGTCTTGGAGATG |
| | GAACCTTATGCTGATGCTATAGTTGGTGTTGCTGGTGAAGGTTTAAACGT |
| | CGAACAAAGAAAAAGGTTGACCATCGGAGTTGAATTGGCTGCTAAACCTA |
| | ATCTGCTGTTGTTCTTGGATGAACCTACAAGTGGTTTGGATTCTCAAACTG |
| | CTTGGTCTATTTGCCAGTTGATGAAGAAGTTGGCTAATAGAGGTCAAGCT |
| | ATTTTGTGCACCATTCATCAACCATCTGCCATGTTGATCCAAGAATTTGAT |
| | AGGTTGCTGTTCCTGCAAAAAGGTGGTCAAACTGTTTATTTTGGTGACTTG |
| | GGTAAAGACTGCAAGTCCATGATTCATTACTTCGAATCTCACGGTTCTCAT |
| | AAGTGTCCATCTGATGGTAATCCAGCAGAATGGATGTTGGAAATTGTCGG |
| | TGCTGCTCCAGGTACTCATGCTAATCAAGATTACTACGAAGTTTGGCGTA |
| | ACTCCGAAGAATATCAAGAGGTCAGAAAAGAATTGGACAGGATGGAAGAT |
| | GAATTGAAGGGTATTGATGGTGGTGACGAACCAGAAAAACACAGATCTTT |
| | TGCTACTGACATCTTCACCCAGATCAGATTGGTTTCCCATAGATTGCTACA |
| | ACAATATTGGAGGTCACCCTCTTACTTGTTTCCAAAGTTTTTGCTGACAGT |
| | GTTCTCCGAGTTGTTCATCGGTTTTACTTTGTTCAAGGCTGACAGAAGCTT |
| | GCAAGGTCTACAAAATCAAATGCTGTCCGTTTTCATGTACACCGTTGTTTT |
| | TAACACCTTGTTGCAGCAATACTTGCCCTTGTATGTTCAGCAAAGAAACTT |
| | GTACGAAGCTAGAGAAAGACCTTCTAGAACTTTCTCTTGGTTTGCCTTCAT |
| | CGTGTCCCAAATCTTCATTGAAGTTCCTTGGAACATTTTGGCTGGTACTGT |
| | TGCTTTCTTTTGTTACTATTACCCAATCGGCTTCTACAGAAACGCTTCTGA |
| | ATCTCATCAATTGCACGAAAGAGGTGCTTTGTTTTGGTTATTCTCTACCGC |
| | TTACTACGTCTGGATTGGTTCTATGGGTTTGTTGGCTAACTCTTTCATCGA |
| | ACATGATGTTGCAGCTGCTAATTTGGCATCTTTGTGTTATACTTTGGCCTT |
| | GTCTTTTTGCGGTGTTTTGGCTACTCCAAAAGTTATGCCAAGATTCTGGAT |
| | ATTCATGTACCGTGTTTCTCCCTTGACCTACTTCATTGATGCTACTTTAGC |
| | TACCGGTATTGCTAACGTTGATGTTAAGTGTGCTGATTACGAATTCGCTAA |
| | GTTCACTCCACCAAAAGGTCAAAATTGTGGTGACTACATGAAGAACTTCAT |
| | TAAGTCTGCTGGTACGGGTTACTTGAAAGATTCTTCAGCTGTTGACGAAT |
| | GCAACTTCTGCCAATTCTCTACTACTAATGCCTACTTGGAATCCGTTACCT |
| | CTTCATACTCTAGACGTTGGAGAAATTACGGTATCTTCATTTGCTTCATTG |
| | CCTTCGATTATATTGCCGCCGTTTTCTTATATTGGTTGGCTAGAGTTCCAA |
| | AGAAGTCCGGTAAAGTTTCAGGTAAGAAGTAA |
| SEQ ID | MEFEPKSEGSLPSYEGLDKSAEVQVQRLAHGVNPIHEGAPQLDPNSSDFSS |
| NO: 974 | KAWIQNMANLSSEDPDHFKPYQVGCCWKDLAASGASADVAYQTTVENLPW |
| | KVLFWIYRKLRPTRKSDIFQILKPMDGALDPGEVLVVLGRPGSGCTTLLKSIAS |
| | NTHGFNIAKDSTISYSGLSPKDINRHFRGEVVYNAETDIHLPHLTVYQTLLTVS |
| | RLKTPQNRIKGVDRETWARHMTDVVMATYGLSHTKNTKVGGDLVRGVSGG |
| | ERKRVSIAEVTICGSKFQCWDNATRGLDAATALEFIKALRTQADILASTACIAIY |
| | QCSQNAYDLFDKVCVLYSGYQIFFGSAGDAKRYFEEMGYHCPSRQTTADFL |
| | TSVTSPAERTVNNEYIEKGIHVPETPEEMSDYWRNSQEYRDLQEQIQNRLDQ |
| | NHEEGLRAIKESHNAAQSKRTRRSSPYTVSYGMQIKYLLIRNMWRIKNSSGIT |
| | IFQVFGNSVMALLLGSMFYKVLKPSSTDTFYYRGAAMFFAILFNAFSSLLEIFS |
| | LYEARPITEKHRTYSLYRPSADAFASVLSEIPPKIVTAICFNVALYFLVHFRVDA |
| | GRFFFYFLINILAIFSMSHMFRCVGSLTKTLTEAMVPASILLLVLSMYTGFAIPK |
| | TKMLGWSKWIWYINPLSYLFEALMVNEFHDRNFSCTSFIPMGPGYQSVSGT |
| | QRVCAAVGAEPGQDYVLGDNYIKQSYGYENKHKWRAFGVGMAYVIFFFFVY |
| | LFLCEVNQGAKQNGEILVFPQSVVRKMRKQKKISAGSNDSSDPEKTIGVKVN |
| | DLTDTTLIKNSTDSSAEQNQDIGLNKSEAIFHWRNVCYDVQIKSETRRILDNID |
| | GWVKPGTLTALMGATGAGKTTLLDSLAQRVTTGVLTGSIFVDGKLRDESFAR |
| | SIGYCQQQDLHLTTATVRESLLFSAMLRQPKSVPASEKRKYVEEVINVLEME |
| | PYADAIVGVAGEGLNVEQRKRLTIGVELAAKPNLLLFLDEPTSGLDSQTAWSI |
| | CQLMKKLANRGQAILCTIHQPSAMLIQEFDRLLFLQKGGQTVYFGDLGKDCK |
| | SMIHYFESHGSHKCPSDGNPAEWMLEIVGAAPGTHANQDYYEVWRNSEEY |
| | QEVRKELDRMEDELKGIDGGDEPEKHRSFATDIFTQIRLVSHRLLQQYWRSP |
| | SYLFPKFLLTVFSELFIGFTLFKADRSLQGLQNQMLSVFMYTVVFNTLLQQYL |
| | PLYVQQRNLYEARERPSRTFSWFAFIVSQIFIEVPWNILAGTVAFFCYYYPIGF |
| | YRNASESHQLHERGALFWLFSTAYYVWIGSMGLLANSFIEHDVAAANLASLC |
| | YTLALSFCGVLATPKVMPRFWIFMYRVSPLTYFIDATLATGIANVDVKCADYE |
| | FAKFTPPKGQNCGDYMKNFIKSAGTGYLKDSSAVDECNFCQFSTTNAYLES |
| | VTSSYSRRWRNYGIFICFIAFDYIAAVFLYWLARVPKKSGKVSGKK- |
| SEQ ID | ATGTCCAACTCCGCCTACGATATTGAAGATCATCCTGAAGAGGTTAACAAGTACGAT |
| NO: 975 | GGTTACAACAACGCTGTTGATTCCGAAGTTCAAAGATTGGCTAGACAAATCACCCA |
| | AAACTCCCAATTGTCTTTTCAAGATGACGGTTTTAAGTTGGCTCCAGGTGAATCTAA |
| | TATCGACGGTTTGTCTAGAGTTTCTACTATTGCTCCTGGTGTTAACCCAATGCAAAAC |
| | GTTGAAGAATTGGACCCAAGATTGGATCCTAACTCTGAAGAATTCCAATCCAGATA |
| | CTGGATCAAGAACTTCAAGGCTTTGATGGATAAGGATCCAGATCACTACAAGAACT |
| | ACTCATTGGGTGTTACCTTCAAGAATTTGAGAGCTTCTGGTGAAGCTTCTGATGCTG |
| | ATTATCAAACCACCATTATTAACGCCCCATTCAAGATTGCTAAGCAATATGCTAAAG |
| | CCGTGTTCTCTACTAGATCTGCTAAACAAGCTAACAGGTTCGACATCTTGAAGTCTTT |
| | GGATGGTATAGTTAGACCAGGTGAAGTTTTGGTTGTTTTGGGTAGACCTGGTTCTG |
| | GTTGTACTACTTACTTGAAATCCATTGCCTCTAACACCCATGGTTTTAAGATAGGTCA |
| | AGAGTCCGAAATGTCTTACGAAGGTTTGACCCAAAAAGAGATCAAAAAGCACTTTA |
| | GAGGTGAGGTTGTTTACAACGCCGAATCCGATATTCATTTCCCACATTTGACTGTTT |
| | GGCAAACTTTGACTACTGCTGCTAAATTCAGAACCCCAGAAAACAGAATTCCAGGT |
| | ATCTCAAGAGAAGATTACGCTAACGCTTTGACCGAAGTTTTTATGGCTACTTATGGT |
| | TTGTCCCATACCAAGAATACCAAGGTTGGTTCAGAATTGGTTAGAGGTGTTTCTGGT |
| | GGTGAAAGAAAGAGAGTTTCAATTGCCGAAGTTTCTTTAGCTGGTGCTAGATTGCA |
| | ATGTTGGGATAATGCTACTAGAGGTTTGGATGCTGCTACTGCTTTGGAATTCATTAG |
| | AGCTTTAAGAACCTCCGCTGATGTTTTGGATACAACTGCTTTGATTGCTATCTACCAA |
| | TGTTCCCAAGAAGCCTACGATTTGTTCGATAAGGTTTCTGTCTTGTACGAGGGTTAC |
| | CAAATTTTCTTTGGTAGAGCTGATAAGGCCAAAGAATACTTCATTAACATGGGTTGG |
| | GAATGCCCACCAAGACAAACTACAGCTGATTTCTTGACTTCTGTTACCTCTCCAAGA |
| | GAAAGAGTTCCAAGAGCTGGTTTTGAAAAGAAGGTTCCAAGAACTCCATCTGAATT |
| | TGCTACTTATTGGAAAGCTTCTCCAGAGTACAAGGCATTGATTGCCGAAATTGATGA |
| | ATCCTTGGCTGCCAATCAAAAGTCCGAATTGAAGGATTTGATCTACGATGCTAAGG |
| | CCTCCAGACAATCTAAAAGAATGAGAAAGACTGACCCCTACACCGTTTCTATTTCAT |
| | TGCAAACTAAGTACCTGTTGGAGAGAGAAGTCTACAGGATTAAGAACAACTTTGGT |
| | TTCCATGGCTTCTCCGCTATTGCTAATTCTTTGATGGCTTTGGTTTTGGCCTCCATCTT |
| | TTACAACATGTCTAAGACTACCGAGTCCTTCTATTCTAGAGGTGCTGCTATGTTTTTC |
| | GCTTGTTTGTTTAACGGTTTCCAGTCCTTCTTGGAGATCTTGTCTTTGTTTGAAGCCA |
| | GACCAATTATCGAAAAGCACAAACAATACGCCTTGTATCATCCAGCTGCTGAAGCTT |
| | TGGCTTCTGTTATTTCTCAATTGCCTTTTAAGGCCTTCTCCTCCTTGATGTTTAACCTG |
| | ATCTATTACTTCATGGTCAACTTCAGAAGAGATCCAGGTAGATTCTTCTTCTACTTGT |
| | TGGCTAACGTTACTTCTACCTTCACCATGTCTCATTTCTTCAGATTGATCGGCTCTAT |
| | GTCATCTACTTTGCCACAAGCTTTGGTTCCAGGTCATATAGTTTTGTTGGGTTTGTCC |
| | ATGTTCGTCGGTTTTACTATTCCAGTCAACTACATGTTAGGTTGGTGCAGATGGATT |
| | AACTACATTAACCCATTGGCTTACGCTTTCGAAGCTTTAATGGCTAACGAATTCCAT |
| | GGTTTGAGATACGCTTGTTCTGCATTTTTGCCAGATAACCCAGATAATCATCCAGAT |
| | TGGCCAGCTAAATCTTGGATCTGTAATGCTGTTGGTGCTGTTGCCGGTGAAGCTACT |
| | GTTTCAGGTGATGCTTACTTAGATGCTGCTTACTCCTACTCTAATTCTCATAAGTGGC |
| | GTAACTGGGCTATTACTTTTGCCTTCTGTATTTTCTTCTTGGCCACCTACATGATTTTC |
| | GCTGAGTATAATGAATCCGCCAAGCAAAAGGGTGAAATCTTGTTGTTTCAAAGGTC |
| | CACCTTGAAGAAGTTGAAGAAAGAACATAAGGCTGCCAAGAACGATATCGAAGGT |
| | GGTAAATTGAGAGACATCACCGAACAAGATCACGACGAAGAATCTGAACAACACG |
| | TTGATGCTATTCAAGCCGGTAAGGATATTTTCCATTGGAGAGATGTTCATTACACCG |
| | TCAAGATTAAGTCCGAGTACAGGGAAATTTTGTCTGGTGTTGATGGTTGGGTTAAG |
| | CCAGGTACTTTGACTGCCTTGATGGGTGCTTCAGGTGCTGGTAAAACTACTTTGTTG |
| | GATGTCTTGGCTAACAGAGTTACTATGGGTATCGTTACTGGTAACATGTTCGTTAAC |
| | GGTAGATTGAGGGATTCCTCATTCCAAAGATCTACTGGTTACGTTCAACAACAGGA |
| | CTTGCATTTGCCAACTGCTACTGTTAGAGAAGCCTTGAGATTTTCTGCTTACTTGAGA |
| | CAACCAGCTGAAGTCTCTAAAGCTGAAAAGGATGACTATGTCGAAGAGGTCATTAA |
| | GATCTTGGACATGCAAAAGTATGCTGATGCTGTTGTTGGAGTTGCTGGTGAGGGTT |
| | TGAATGTTGAACAAAGAAAAAGATTGACCATCGGTGTTGAATTGGCTGCTAAGCCT |
| | AAGTTGTTGTTGTTTTTCGATGAACCTACCTCCGGTTTGGATTCTCAAACTGCTTGGT |
| | CTATTTGCCAGTTGATGAGAAAGTTGGCTAATCACGGTCAAGCTATTTTGTGCACTA |
| | TTCATCAACCATCCGCCATCTTGATGCAAGAATTCGATAGATTGCTGTTCTTAGCCAA |
| | AGGTGGTAGAACTGTTTACTTTGGTGACTTAGGTGAAGGTTGCCAAACCTTGATTG |
| | ATTACTTTGAAAAGTACGGTGCTCCAAAGTGTCCTCCTGAAGCTAATCCAGCTGAAT |
| | GGATGTTGCATGTTATTGGTGCTGCTCCAGGTTCTCATGCTAATCAAGATTATCATC |
| | AAGTCTGGTTGGATTCCGCTGAAAGAAGAGATGTATTGTCTGAATTGGACAGGATG |
| | GAAAAAGAGTTGGTTAACATTCCAGTTGACGATTCCGTTTCTCACTCAGAATTTGCT |
| | GCACCATTTTGGGTTCAATTGACTGTTGTTACTGCCAGAGTGTTCCAACAATTTTGG |
| | AGAACACCATCTTACATTTGGGCCAAGATGTTTTTGTCCGTCGTTTCCTCTTTGTTTA |
| | TCGGCTTTATCTTCTTCAGGTCGAAGAACTCTATCCAAGGCTTGCAAAATCAAATGT |
| | TCGCCTTGTTCATGTTCCTGACCATTTTTAACCCACTGCTGCAACAAATTTTGCCCACT |
| | TTTGTTTCTCAGAGGGACTTGTACGAAACTAGAGAAAGACCAGCTAAGACCTTTTCA |
| | TGGAAGGCTTTCATTATCGCTCAATTCATAGCTGAAGCTCCATGGAATGCTTTTGTT |
| | GGTACAGTTGGTTTCTTCTGCTTTTATTACCCAGCTGGTTTCTACAGAAATGCCGAAC |
| | CATATGATGAAGTCAATGGTAGAGGTGCATATGGTTGGTTCTTTGCTGTTTTGTTCT |
| | TCATCTACATTGGTTCTATGGCCCATATGTTGATTGCCCCTTTACAAATTGCTGATTC |
| | TGCTGGTAATTTGGGCTCTTTGTTGTTCACTATGTGTTTGACTTTCTGCGGTGTTTTG |
| | GTTACTAAGGATGCTTTGCCAGGTTTTTGGGTTTTCATGTATAGAGTCTCTCCATTCA |
| | CCTACTTCATCGAAGGTTATTTGACTAATGCTTTGGCCCATAACAAGATCGTCTGTTC |
| | AGAAGAAGAGTTCAGAGTTTTGTCTCCACCAGATGGTTTGACTTGCCAAGATTATTT |
| | GGGTGACTACATTTCTAAAGCCGGTACAGGTTACTTGCAAGATCCAGAAGCAACTG |
| | GTTCTTGTCAATTTTGTCCAATGTCTAAAACGGACGACTTCTTGGCTCAAGTTCAATT |
| | GGATTATGGTAACAGATGGCGTGATGTCGGTATTTTCATTGCCTTCATTTTCATCAA |
| | CTTGTTCTTCGCCGTCCTGTTTTATTGGTTGGCTAGAGTTCCTAAGAAGTCCGATAG |
| | AGTTAGTACTGAACAACCTGAAGGTGCTGTTAATATGGGTGCTGAATTAGAAAAGA |
| | AAGCCGCCTTGCATAGAACTGCTACAAATGCTGCTTCACAAGCTGCTTCTCAAGGTT |
| | ATGCTCCACAAGTCTATAACGAAAAAGTCGGTTCTGAAGAAGGCTCCTTGGATAAG |
| | GTTGATAACTCTGATTCTTCCAGGTAA |
| SEQ ID | MSNSAYDIEDHPEEVNKYDGYNNAVDSEVQRLARQITQNSQLSFQDDGFKLAPGESNI |
| NO: 976 | DGLSRVSTIAPGVNPMQNVEELDPRLDPNSEEFQSRYWIKNFKALMDKDPDHYKNYSL |
| | GVTFKNLRASGEASDADYQTTIINAPFKIAKQYAKAVFSTRSAKQANRFDILKSLDGIVRP |
| | GEVLVVLGRPGSGCTTYLKSIASNTHGFKIGQESEMSYEGLTQKEIKKHFRGEVVYNAES |
| | DIHFPHLTVWQTLTTAAKFRTPENRIPGISREDYANALTEVFMATYGLSHTKNTKVGSEL |
| | VRGVSGGERKRVSIAEVSLAGARLQCWDNATRGLDAATALEFIRALRTSADVLDTTALI |
| | AIYQCSQEAYDLFDKVSVLYEGYQIFFGRADKAKEYFINMGWECPPRQTTADFLTSVTS |
| | PRERVPRAGFEKKVPRTPSEFATYWKASPEYKALIAEIDESLAANQKSELKDLIYDAKASR |
| | QSKRMRKTDPYTVSISLQTKYLLEREVYRIKNNFGFHGFSAIANSLMALVLASIFYNMSK |
| | TTESFYSRGAAMFFACLFNGFQSFLEILSLFEARPIIEKHKQYALYHPAAEALASVISQLPF |
| | KAFSSLMFNLIYYFMVNFRRDPGRFFFYLLANVTSTFTMSHFFRLIGSMSSTLPQALVPG |
| | HIVLLGLSMFVGFTIPVNYMLGWCRWINYINPLAYAFEALMANEFHGLRYACSAFLPD |
| | NPDNHPDWPAKSWICNAVGAVAGEATVSGDAYLDAAYSYSNSHKWRNWAITFAFCI |
| | FFLATYMIFAEYNESAKQKGEILLFQRSTLKKLKKEHKAAKNDIEGGKLRDITEQDHDEES |
| | EQHVDAIQAGKDIFHWRDVHYTVKIKSEYREILSGVDGWVKPGTLTALMGASGAGKTT |
| | LLDVLANRVTMGIVTGNMFVNGRLRDSSFQRSTGYVQQQDLHLPTATVREALRESAYL |
| | RQPAEVSKAEKDDYVEEVIKILDMQKYADAVVGVAGEGLNVEQRKRLTIGVELAAKPKL |
| | LLFFDEPTSGLDSQTAWSICQLMRKLANHGQAILCTIHQPSAILMQEFDRLLFLAKGGRT |
| | VYFGDLGEGCQTLIDYFEKYGAPKCPPEANPAEWMLHVIGAAPGSHANQDYHQVWL |
| | DSAERRDVLSELDRMEKELVNIPVDDSVSHSEFAAPFWVQLTVVTARVFQQFWRTPSY |
| | IWAKMFLSVVSSLFIGFIFFRSKNSIQGLQNQMFALFMFLTIFNPLLQQILPTFVSQRDLY |
| | ETRERPAKTFSWKAFIIAQFIAEAPWNAFVGTVGFFCFYYPAGFYRNAEPYDEVNGRGA |
| | YGWFFAVLFFIYIGSMAHMLIAPLQIADSAGNLGSLLFTMCLTFCGVLVTKDALPGFWV |
| | FMYRVSPFTYFIEGYLTNALAHNKIVCSEEEFRVLSPPDGLTCQDYLGDYISKAGTGYLQD |
| | PEATGSCQFCPMSKTDDFLAQVQLDYGNRWRDVGIFIAFIFINLFFAVLFYWLARVPKK |
| | SDRVSTEQPEGAVNMGAELEKKAALHRTATNAASQAASQGYAPQVYNEKVGSEEGSL |
| | DKVDNSDSSR |
| SEQ ID | ATGTCCTTGAACAACACCCCAAACCATCACCAAGATGATTCTGATCATTCA |
| NO: 977 | GTTCCAGATGTTCCAGAAGAGTACAAGGGTTTCGATCAAAACGTTGATGT |
| | TCACATTCAAAACTTGGCCAGACAAATTACCAATGCTTCTCAAGCTAACAC |
| | CTCCTTGTCTAGAGTTTCTTCTATTGCTCCAGGTGTTGTTGCTATTAACAA |
| | CCCAGATGTTGATCCAAGATTGGACCCAAATTCTGACAACTTCGAATCTA |
| | GATACTGGATCAAGAACTTCAAGAACCTGATGGATAAGGATCCAGATCAT |
| | TACGCTAACTACTCATTGGGTATCGTCTACAAGAATTTGAGAGCTTTTGGT |
| | GAAGCTACCGATGCTGATTATCAAACTACTGTTTTGAACATGCCATTGAAG |
| | TACGCTGGTAAAGCTTTGAAATACGCCTTGTCATCTAGATCTGCTAAGAA |
| | GGCTAAGCAATTCGATATCTTGAAACCTATGGACGCCTTGATTAAGCCAG |
| | GTGAAGTTGTTGTTGTTTTGGGTAGACCAGGTTCTGGTTGTTCTACTTTGT |
| | TGAAAACCATTGCCTCTAACACCCATGGTTTCCATATTGGTGAAGAATCC |
| | GAAATCTCTTACGAAGGTTTGACCCAAAAGGATATCAAGAGACATTATAG |
| | GGGTGAAGTTATCTACAACGCCGAAACCGATATTCATTTCCCACATTTGA |
| | CTGTTTGGCAGACTTTGTCTTTGGCTGCTAAATTCAGAACTCCACAAAACA |
| | GAATTCCAGGCATCTCAAGAGAAGATTACGCCAATCATTTGACCGAAGTT |
| | TACATGGCTACTTACGGTTTGTCTCATACCAAGAATACCAAGGTTGGTAAC |
| | GAAAACGTTAGAGGTGTTTCTGGTGGTGAAAGAAAGAGAGTTTCAATTGC |
| | CGAAGTTTCTTTGTCTGGTGCTAGATTGCAATGTTGGGATAATGCTACTAG |
| | AGGTTTGGATGCTGCTACTGCTTTGGAATTCATTAGAGCTTTGAGAACCC |
| | AAGCCGATATTTTGGATACAACTGCTTTCGTTGCTATCTACCAGTGTTCTC |
| | AAGATGCTTACGATTTGTTCGATAAGGTGTCTGTCTTGTATGAAGGTTACC |
| | AAATCTACTTCGGTAGAGCTGATGAAGCTAAGGATTACTTTGTTAGAATGG |
| | GTTACCATTGTCCAGCTAGACAAACTACAGCTGATTACTTGACTTCTATCA |
| | CCTCTCCAAGAGAAAGAGTTGCTTCTAAGGGTTTTGAAAACAAGGTTCCA |
| | AAGACGCCAAAAGAGTTTGAAACTTACTGGAAAGCTTCTCCTGAATACGC |
| | TAAGTTGGTTCAAGAAATTGATGCCACCTTGCAAAACCACGATGATAATTC |
| | TAAGGCCATTATCAAGTCCGCTCACAATCAAAAGCAAGCTAAACATATGA |
| | GACACACCTCACCATACACTGTTTCATTTTGGATGCAAGTCAGATACTTGT |
| | TGACCAGAGATTTCCAGAGAATCAGAAACGATTTGGGCTTCAACTTGTTT |
| | CAAGTTTGGGCTAATTCTCTGATGGCCTTGATTTTGTCCTCCATCTTTTAC |
| | AACATGCAGTCTAACACTGGCAGCTTTTATTACAGAGGTGCTGCTATGTTT |
| | TTCGCCGTTTTGTTTAATGGCTTCTCGTCCTTCTTGGAAATCATGACTTTG |
| | TTTGAAGCCAGGCCAATTATCGAAAAGCACAAGCAATACTCGTTGTACCA |
| | TCCATCTGCTAACGCTTTATCTTCCGTTTTTAGTCAAGTCCCTTCTAAGAT |
| | GGTTACCTCTGTTGCTTTTAACTTGGTCTTTTACTTCATGGTCAACTTCAG |
| | AAGAAACCCAGGTAGATTCTTCTTCTACTACTTGATGAACTTGACCGCTAC |
| | CTTTTCCATGTCTCATTTCTTTAGATTGGTTGGTTCTGCTGCTTCTTCATTG |
| | CCAGAAGCTTTGGTTCCAGCTCATATTATCTTGTTGGCTTTGACTATTTTC |
| | ACCGGTTTCGTTATCCCAGTCAACTATATGTTAGGTTGGTCCAGATGGAT |
| | CAACTACTTGGATCCATTGGCTTATGCTTTCGAAGCTTTGATGGCAAATGA |
| | ATTCGCTGGTAGAGAATTCGAATGCTCCCAATTCATTCCAGGTGATCCTA |
| | GAACTACTCCAGGTATTCCAGATGATGGTTTCATTTGCTCTGTTGTCTCTT |
| | CTGTTCCAGGTTCTTTTGTTGTTGATGGTTCTAGGTACTTGGAGGTCAATT |
| | ACAAGTACAAGAACTCTCATAAGTGGCGTAACTGGGGTATTACTTTGGCT |
| | TTCACTCTGTTTTTCTTGTTCGTCTACTTGGTGTTCTCTGAGTACAATGAAT |
| | CTGCTATGCAAAAGGGTGAAGTCCTGTTGTTTCAAAGATCTACCTTGCGT |
| | AAGTTGAAAAAGCAGCATGGTGATATTAAGAACGACTTGGAAGCTGGTTC |
| | TGAAAGAGATGTTACTGAACAAGATGAAGAAGAAGGCGAACAAAACGTAG |
| | ACGTTATTCATGCTGGTACTGATATCTTCCATTGGAGAGATGTTCACTACT |
| | CCGTCAAGATTAAGAAAGAAACCAGGGAAATCTTGAACGGTGTTGACGGT |
| | TGGGTTAAGCCTGGTACTTTGACTGCTTTAATGGGTGCTTCTGGTGCTGG |
| | TAAAACTACCTTGTTGGATGTTTTGGCTAACAGAGTTACTATGGGTGTTGT |
| | CACTGGTAACATGTTTGTTAACGGTCACTTGAGAGACAACTCATTCCAAA |
| | GATCAACTGGTTACGTCCAACAACAAGACTTGCATTTGAAAACTGCTACT |
| | GTTAGAGAAGCCTTGCAATTCTCTGCTGATTTGAGACAACCTAAAGAAGT |
| | CTCTAAGGCTGAAAAAGATGCCTACGTTGAAGAAGTCATTAAGATCCTGG |
| | ATATGGAAAAGTACGCAGATGCTGTTGTTGGTGTTGCTGGTGAAGGTTTA |
| | AATGTCGAGCAAAGAAAAAGATTGACCATCGGTGTTGAATTAGCTGCTAA |
| | ACCTAAGCTGTTGCTGTTTTTGGATGAACCTACTTCTGGTTTGGATTCTCA |
| | AACTGCTTGGTCTATTTGCCAGTTGATGAGAAAGTTGGCTAACCATGGTC |
| | AAGCTATTTTGTGCACTATTCATCAACCATCCGCTATCTTGATGCAAGAAT |
| | TCGATAGATTGCTGTTCTTGGCTAAAGGTGGTAGAACTGTTTACTTTGGTG |
| | ATTTGGGTGAAAACTGTCAGTCCTTGATTGACTACTTCGAAAAGTATGGTG |
| | CTCCAAAATGTCCACCACAAGCTAATCCAGCTGAATGGATGTTGCATGTT |
| | ATTGGTGCTGCACCAGGTTCACATGCTAATCAAGATTATCACCAAGTCTG |
| | GTTGGAATCCTCTGAAAGACAAGATGTATTGAACGAATTGGACAGGTTGG |
| | AAACCGAATTGGTTAAGTTGCCAAGAGATGACTCTATCGGTCAAGAAGAA |
| | TTTGCTGCTCCATTGTGGAAACAATACTTGATTGTCACCAAGAGAATCTTG |
| | CAACAGCATTGGAGATCACCAGTTTACATTTGGTCTAAGTTGTTCCTAGCC |
| | GTGTCCTCTTCTTTGTTTATTGGTTTTGCTTTCTTCAAGGCTAAGAACACT |
| | CAACAGGGATTGCAAAATCAAATGTTCGGCATCTTCATGTACCTGATCATT |
| | TTCAACCCATTGGTCCAACAAACTTTGCCAGCTTTTGTTGAACAAAGAGCC |
| | TTGTACGAAACTAGAGAAAGACCATCTAAGACCTTTTCATGGAAGGCTTTT |
| | ATTGCTGCCCAAATTACCTCTGAAATTCCTTGGAATGCTTTGGTTGGTACT |
| | ATTGCCTTTCTGTGTTTTTACTACCCAGTCGGTTTCTACAACAATGCCTCT |
| | CCAACTAATGCAGTTGATAAGAGAGGTGCTTACGCTTGGTTTTTCAATGTT |
| | TTGTTCTACGTTTACATCGGCACCATGGCTCATTTGTGTATTGCTGGTTTA |
| | GAATTGGCTGATGCTGCTGGTAATATTGCTTCATTGGCTTTTACCTTGTGT |
| | TTGACCTTTTGCGGTGTTTTAGTTGGTCCAAAAGCCTTACCAGGTTTCTGG |
| | ATTTTTATGTACAGGGCTAATCCATTCACCTACTTCATAGATGGTTTCTTGT |
| | CTAATGCCCTGGCTAACAATAGAGTTCAATGTTCCACTCAAGAATACGTC |
| | CATTTTAATCCACCATCTGGTTATACTTGTGGTCAGTACATGCAATCCTAC |
| | ATCGAAAAAGCTGGTACAGGTTATTTGTCTGATCCAGATGCTACTACTGAT |
| | TGCAATTTCTGTGCTATGTCTACTACCAACGCCTTCTTGAAATTCGTTTCC |
| | TTGGATTATTCTAGGCGTTGGAGAAACGTTGGTATTTTCATTGCCTTCATT |
| | TTCATCAACATTATCGGCGCCACATTCTTTTTCTGGTTGGCTCGTGTTCCT |
| | AAAAAGGCTGATAGAGTTAAGGGTCAAGCCAAAGAAAGATGTGCTGAAAG |
| | AGCTGCTCAAAAACAAGAGACTAACTCCTTCAACGAGAAAGAGGAATCTT |
| | CTACCAACTAA |
| SEQ ID | MSLNNTPNHHQDDSDHSVPDVPEEYKGFDQNVDVHIQNLARQITNASQANTSLSRVS |
| NO: 978 | SIAPGVVAINNPDVDPRLDPNSDNFESRYWIKNFKNLMDKDPDHYANYSLGIVYKNLR |
| | AFGEATDADYQTTVLNMPLKYAGKALKYALSSRSAKKAKQFDILKPMDALIKPGEVVVV |
| | LGRPGSGCSTLLKTIASNTHGFHIGEESEISYEGLTQKDIKRHYRGEVIYNAETDIHFPHLT |
| | VWQTLSLAAKFRTPQNRIPGISREDYANHLTEVYMATYGLSHTKNTKVGNENVRGVSG |
| | GERKRVSIAEVSLSGARLQCWDNATRGLDAATALEFIRALRTQADILDTTAFVAIYQCSQ |
| | DAYDLFDKVSVLYEGYQIYFGRADEAKDYFVRMGYHCPARQTTADYLTSITSPRERVAS |
| | KGFENKVPKTPKEFETYWKASPEYAKLVQEIDATLQNHDDNSKAIIKSAHNQKQAKHM |
| | RHTSPYTVSFWMQVRYLLTRDFQRIRNDLGFNLFQVWANSLMALILSSIFYNMQSNTG |
| | SFYYRGAAMFFAVLFNGFSSFLEIMTLFEARPIIEKHKQYSLYHPSANALSSVFSQVPSKM |
| | VTSVAFNLVFYFMVNFRRNPGRFFFYYLMNLTATFSMSHFFRLVGSAASSLPEALVPAH |
| | IILLALTIFTGFVIPVNYMLGWSRWINYLDPLAYAFEALMANEFAGREFECSQFIPGDPRT |
| | TPGIPDDGFICSVVSSVPGSFVVDGSRYLEVNYKYKNSHKWRNWGITLAFTLFFLFVYLV |
| | FSEYNESAMQKGEVLLFQRSTLRKLKKQHGDIKNDLEAGSERDVTEQDEEEGEQNVDV |
| | IHAGTDIFHWRDVHYSVKIKKETREILNGVDGWVKPGTLTALMGASGAGKTTLLDVLA |
| | NRVTMGVVTGNMFVNGHLRDNSFQRSTGYVQQQDLHLKTATVREALQFSADLRQPK |
| | EVSKAEKDAYVEEVIKILDMEKYADAVVGVAGEGLNVEQRKRLTIGVELAAKPKLLLFLD |
| | EPTSGLDSQTAWSICQLMRKLANHGQAILCTIHQPSAILMQEFDRLLFLAKGGRTVYFG |
| | DLGENCQSLIDYFEKYGAPKCPPQANPAEWMLHVIGAAPGSHANQDYHQVWLESSER |
| | QDVLNELDRLETELVKLPRDDSIGQEEFAAPLWKQYLIVTKRILQQHWRSPVYIWSKLFL |
| | AVSSSLFIGFAFFKAKNTQQGLQNQMFGIFMYLIIFNPLVQQTLPAFVEQRALYETRERP |
| | SKTFSWKAFIAAQITSEIPWNALVGTIAFLCFYYPVGFYNNASPTNAVDKRGAYAWFEN |
| | VLFYVYIGTMAHLCIAGLELADAAGNIASLAFTLCLTFCGVLVGPKALPGFWIFMYRANP |
| | FTYFIDGFLSNALANNRVQCSTQEYVHFNPPSGYTCGQYMQSYIEKAGTGYLSDPDATT |
| | DCNFCAMSTTNAFLKFVSLDYSRRWRNVGIFIAFIFINIIGATFFFWLARVPKKADRVKG |
| | QAKERCAERAAQKQETNSFNEKEESSTN- |
| SEQ ID | ATGAAGGCCAACAAGTCTAACATGGCTGGTGATCCACATGGTTCTTGTGATTCTGCT |
| NO: 979 | GTTTTGACTAGAAACACCTCTCCAGAATTGCCAGAATATGATGGTTTGGATTGCTCT |
| | GCTAGAGCTTCTGTTAGAGAATTGGCTAGAACTTTCACTAACGGTTCTGTTGCTTCT |
| | AATTCTAAAGCTGCTGCTGTTGGTGTTCATGCTACTACTGCTTTGCCAGCTTCTAGAA |
| | CTACTACTGAATATGGTGATGTCAACACTACGAACCCAGTTTTCTCTTCTTCTGAATT |
| | GCCATCCTACAACTCTAGATTGGACCCAAATTCTGACGAATTCTCTTCTGCTTTGTGG |
| | GTCAAGAATTTGTCCCAATTGATTGCTTCTGATCCAGATCACTACAAGCCATATTCTT |
| | TGGGTTGTACTTGGAAGAACTTGAGAGCTTATGGTAACGCTACTGATGTTGCTTACC |
| | AATCTACTTTTGCTAACTTGCCATTGCAGTTGTTGGAATCTGGTTATAGAGCTGCTA |
| | GAAAAGCTAGACCAGAAGATTCCTTCGATATCTTGAAACCTATGGATGGTATCGTTA |
| | AGCCATCAGAGTTGTTGGTTGTTTTGGGTAGACCAGGTTCTGGTTGTTCTACTTTGT |
| | TGAAGTCTATTTCCGCTAACACCCATGGTTTCCATATCGATTCTGATTCCGAAATCTT |
| | CTACGATGGTATGGACCCTAAAGAAATTGCTAAACACTACAGAGGTGAAGTTGTTT |
| | ACAACGCCGAATCTGATGTTCATTTCCCACATTTGACTGTTTTCGACACCTTGAAAAC |
| | TGTTGCTAGATTGTCTTGTCCATCCAACAGATTCCATGGTGTTGATAGAGAAACTTT |
| | CGCTACCCATATTACCGAAGTTGCTATGGCTACTTATGGTTTGTCTCATACCAGAAA |
| | CACTAAGGTCGGTTCAGAATTGGTTAGAGGTGTTAGTGGTGGTGAAAGAAAGAGA |
| | GTTTCTATTGCCGAAGTCTCTATTTGCGGTTCTAAGTTTCAATGTTGGGATAATGCTA |
| | CCAGAGGTTTAGATTCTGCTACAGCCTTGGAATTCATTAGAGCTTTGAGAACTACTG |
| | CCAAGTTGAACAATTCTGCTGGTGTTATTGCTATCTACCAATGCTCTCAAGATGCCTA |
| | CGATTTGTTCGATAAGGTTTGTGTTTTACACGAGGGTTATCAGATCTATTTTGGTCC |
| | AGCTAATGAAGCCAAGCAATACTTTTTGGATATGGGCTATGTTTCCCCAGATAGACA |
| | AACTACTGCTGATTTCTTGACTGCTGTTACTAATCCAGCTGAAAGGATCGTCAATCA |
| | AGAAATGGTTCAAGCTGGTAAGGTTGTTCCATCTTCTGCATCTGAAATGGAAGCTCA |
| | TTGGAAGCAATCTGAAAACTACAAGAGACTGATCAACGAAATCGACCATTACACTA |
| | CTCATGATCAAACCGGTAACAGAGAACAATTGAGAAACGCTCATATCGCTAAGCAA |
| | TCTAAGAGAGCTAGACACTCTTCTTCATACACTGTCTCTTACGGTTTACAGGTGAAG |
| | TACTTGTTGATCAGAAACATGCAGAGGATCAGATCTTCTATGGGTGTCACTTTGTTC |
| | CAAGTTATTGGTAATGGTGGTATGGCTTTCATCTTGGGTTCTATGTTCTACAAGATTT |
| | TGAAGCACGATACCACTGCTGGTTTTTATTCTAGAGCTGGTGCTTTGTTTTTCGCCGT |
| | TTTGTTTAATGCTTTCTCGTGCTTGTTGGAAATCTTGGCATTATATGAAGCCAGGCCA |
| | ATTTCTGAAAAGCACAAGCGTTATTCCTTGTACCATCCTTCTGCTGATGCTTTGGCTT |
| | CAGTTATTAGTGAAATCCCTTCTAAGTTGGTTACCTCCGTTGTTTTTAACTTGGCCTT |
| | GTACTTCTTGTGCAACTTTAAACGTGAAGCTGGTGCCTTTTTCTTCTACTTCTTGATG |
| | ACTATCGTTGCCACGTTTTTGATGTCCCATATCTTTAGATGTTTGGGTGCTGCTACTA |
| | AGACTTACGCTGAATCTATGGTTTCTGCCTCTTTGTTGTTGTTGGCTCAAGCTATCTA |
| | TACCGGTTTTGCTATTCCAAAGACCAACATCTTAGGTTGGTCTAAGTGGATTTGGTA |
| | CATCAACCCATTGTCCTACATCTTCGAATCCTTGATGGTCAACGAATTTCACGGTAG |
| | AAACTTTTCTTGCTCCCAGTATATTCCAGCTGGTTCAGGTTACGAAATTTTGTCTGGT |
| | ACTGAAAGAGTTTGTTCTGCAGTTGGTGCTGTTCCAGGTCAAGATTTCGTTTCTGGT |
| | GAAACCTACATTAACGTTGCTTACGGTTATTACCATGCTCATAAGTGGCGTGGTTTA |
| | GGTATTGGTTTGGCTTATGCTATTGTGTTCTTGGCTGTTTATTTGGCCGTTACCGAAT |
| | TCAATGAATCTGCTAAGCAAAGGGGTGAGATTTTGGTTTTTCCACAATCCGTTATGC |
| | GTAGGATGAAGAAAGAACGTAAACTGAGAAACTCCTCCGATTACTCTGGTACAGAT |
| | GTTGAAAATTCAGCAGGTTCTGCTCCATTGAACGAGAAGAAAATGTTGGATGAATC |
| | CTCTGTTTCTGCCGGTTCTACTTCATCAATGGGTGATGCTAAATTGTCCAAGTCTGAA |
| | GCCATATACCATTGGAGAAACGTTTGCTTCGAAGTCAACATCAAGAAAGAAACCAG |
| | AAGGATCTTGAACAACGTTGATGGTTGGGTTAAGCCAGGTACTTTGACTGCTTTAAT |
| | GGGTGCTTCTGGTGCTGGTAAAACTACTTTATTGGACTGTTTGGCTTCTAGAGTTAC |
| | CACTGGTACTATTACTGGTGACATGTTCATTAACGGTTTCTTGAGAGATGCTTCCTTC |
| | GCTAGATCTATTGGTTACTGTCAACAACAAGACTTGCATTTGGAATCCGCTACTGTA |
| | AGAGAATCTTTGAGATTTGCTGCCTACTTGAGACAACCAGCTACTGTTTCTGAAGAT |
| | GAGAAGAACAAGTACGTGGAAGATGTCATTAAGATCTTGGAGATGGAAACTTACG |
| | CTAACGCTGTTGTAGGTGTTGCTGGTGAAGGTTTGAATGTTGAACAGAGAAAAAGA |
| | TTGACCATCGGTGTTGAATTGGCTGCTAAGCCTAAGTTGTTGTTATTCTTGGATGAA |
| | CCTACCTCTGGTTTGGACTCTCAAACTGCTTGGTCTATTTGTCAGTTGATGAGAAAG |
| | TTGGCTAACCATGGTCAAGCTATTTTGTGCACTATTCATCAACCATCCGCTTTGTTGA |
| | TGCAAGAATTCGATAGACTGTTGTTCTTGCAAAGAGGTGGTCAAACTGTTTACTTCG |
| | GTGAATTAGGTAAGGGTTGCCATAAGATGATCGACTACTTTGAATCTAATGGTGCT |
| | CCAAGATGTCCAGATGGTGCTAATCCTGCAGAATGGATGTTGGCTGTTATTGGTGC |
| | TGCTCCTGGTACTCATGCTAATCAAGATTATCATGAAGTCTGGCGTAATTCCCCAGA |
| | GTACAGAGCTGTTCAAGAGGAATTGGAATGGATGGAACAAGAATTGCCTAAGAAG |
| | CCAATTGACACCTCCAATGAACAAACTGAATTTGCCGCTTCTCTGTTGTATCAGTACT |
| | ACTTGGTTACTAAGAGATTGGCCGAACAATATTGGAGAACTCCATCTTACTTGTGGT |
| | CCAAGTTGATCTTGTCCGTTATCTCCCAAATTTTCATCGGCTTCACTTTCTTCAAGGC |
| | CGATTCTTCATTGCAAGGTCTGCAAAATCAAATGCTGTCCATTTTCATGTTCACCCTG |
| | GTTTTCAACCCTACCTTGCAACAATATTTGCCAACCTTTGTTTCTCAGAGAGGTCTAT |
| | ACGAAGCTAGAGAAAGACCATCTAAGACCTTTTCTTGGGTGTCTTTCATGTTGTCCC |
| | AAATCACTGTTGAAATCCCATGGAATATTTTGGCCGGTACTATTGGTTTCATCATCTA |
| | CTATTATCCAGTCGGCTTTTACAACAACGCTTCAAAAGCTGGTCAATTGCACGAAAG |
| | AGGTGCTTTATTTTGGTTGTACTGTACCGCTTTCTACGTTTTCACTGGTTCTATGGCT |
| | CAAGTATGTATTGCAGGTTTGGATGTAGCTGAAGCAGCTGGTGAATTGGGTAGTTT |
| | GTTGTATACTTTGGCTTTGTCTTTCTGCGGTGTCATGGTTACTCCATCTAATATGCCT |
| | AGATTCTGGCTGTTCATGTACAGAGTTTCACCAATCACCTACTTCATTGACGGTGTTT |
| | TGTCAACTGGTGTTGCTAATGCTGATGTACATTGTGCTGATTACGAAATGGTTAGAT |
| | TCACTCCACCAGCAGGTCAAACATGTGGTCAGTATATGTCTAGATATATCGAAACTA |
| | CCGGTACTGGTTACTTGGATGATCCATCTGCTATGGATGAATGCAAGTTCTGTTCTG |
| | TCTCTGATACCAATGAATTCTTGAAGGCCGTTACATCCTCTTATGATCATCGTTGGAG |
| | AAATTACGGTATCTTCCTGGTCTTTATCTTCGTCAATTTTGCTTTGGCCTCTTTCTTGT |
| | ACTGGCTAATGAGAGTTCCAAAGAAGAGGAATAGAGTTGTCGACGAAAGAAAACC |
| | TGAAGCTCAAAAATTGGCCAGCAAGTGA |
| SEQ ID | MKANKSNMAGDPHGSCDSAVLTRNTSPELPEYDGLDCSARASVRELARTFTNGSVAS |
| NO: 970 | NSKAAAVGVHATTALPASRTTTEYGDVNTTNPVFSSSELPSYNSRLDPNSDEFSSALWV |
| | KNLSQLIASDPDHYKPYSLGCTWKNLRAYGNATDVAYQSTFANLPLQLLESGYRAARKA |
| | RPEDSFDILKPMDGIVKPSELLVVLGRPGSGCSTLLKSISANTHGFHIDSDSEIFYDGMDP |
| | KEIAKHYRGEVVYNAESDVHFPHLTVFDTLKTVARLSCPSNRFHGVDRETFATHITEVA |
| | MATYGLSHTRNTKVGSELVRGVSGGERKRVSIAEVSICGSKFQCWDNATRGLDSATAL |
| | EFIRALRTTAKLNNSAGVIAIYQCSQDAYDLFDKVCVLHEGYQIYFGPANEAKQYFLDM |
| | GYVSPDRQTTADFLTAVTNPAERIVNQEMVQAGKVVPSSASEMEAHWKQSENYKRLI |
| | NEIDHYTTHDQTGNREQLRNAHIAKQSKRARHSSSYTVSYGLQVKYLLIRNMQRIRSSM |
| | GVTLFQVIGNGGMAFILGSMFYKILKHDTTAGFYSRAGALFFAVLFNAFSCLLEILALYEA |
| | RPISEKHKRYSLYHPSADALASVISEIPSKLVTSVVFNLALYFLCNFKREAGAFFFYFLMTIV |
| | ATFLMSHIFRCLGAATKTYAESMVSASLLLLAQAIYTGFAIPKTNILGWSKWIWYINPLSY |
| | IFESLMVNEFHGRNFSCSQYIPAGSGYEILSGTERVCSAVGAVPGQDFVSGETYINVAYG |
| | YYHAHKWRGLGIGLAYAIVFLAVYLAVTEFNESAKQRGEILVFPQSVMRRMKKERKLRN |
| | SSDYSGTDVENSAGSAPLNEKKMLDESSVSAGSTSSMGDAKLSKSEAIYHWRNVCFEV |
| | NIKKETRRILNNVDGWVKPGTLTALMGASGAGKTTLLDCLASRVTTGTITGDMFINGFL |
| | RDASFARSIGYCQQQDLHLESATVRESLRFAAYLRQPATVSEDEKNKYVEDVIKILEMET |
| | YANAVVGVAGEGLNVEQRKRLTIGVELAAKPKLLLFLDEPTSGLDSQTAWSICQLMRKL |
| | ANHGQAILCTIHQPSALLMQEFDRLLFLQRGGQTVYFGELGKGCHKMIDYFESNGAPR |
| | CPDGANPAEWMLAVIGAAPGTHANQDYHEVWRNSPEYRAVQEELEWMEQELPKKP |
| | IDTSNEQTEFAASLLYQYYLVTKRLAEQYWRTPSYLWSKLILSVISQIFIGFTFFKADSSLQ |
| | GLQNQMLSIFMFTLVFNPTLQQYLPTFVSQRGLYEARERPSKTFSWVSFMLSQITVEIP |
| | WNILAGTIGFIIYYYPVGFYNNASKAGQLHERGALFWLYCTAFYVFTGSMAQVCIAGLD |
| | VAEAAGELGSLLYTLALSFCGVMVTPSNMPRFWLFMYRVSPITYFIDGVLSTGVANADV |
| | HCADYEMVRFTPPAGQTCGQYMSRYIETTGTGYLDDPSAMDECKFCSVSDTNEFLKA |
| | VTSSYDHRWRNYGIFLVFIFVNFALASFLYWLMRVPKKRNRVVDERKPEAQKLASK |
| SEQ ID | ATGGACAAGGACAACGAAAACGAAATCGAGGAACCTAATGGTTACGAAGT |
| NO: 981 | TTCTTCTGCTTCTGGTAGATATGAAGGTTTGGATCAAACTGCTGCCCAATC |
| | CATTAAGGATTTGGCTCAATCTTTGTTGGAAGAGTCCAGAGAATCTATTCA |
| | TGCTGCTGGTGAAGGTGTTAATCCAGTTTTTATGTCTGAATCCGGTGATG |
| | ACTACAACCCAAAAGTTGATCCAGCTAACGATGAGTTCTCTAGCAAAGAA |
| | TGGATCAAGAACTTGTCCACCATCATCAAATCTGACCCATCTTTTTACAAG |
| | CCATACACCTTGGGTTGTTCTTGGAGAGATTTGTCTGCTGTTGGTGCTTC |
| | TGCTGATGTTGCTTATCAAACTACTTTCGAAAACTTGCCATGGAAGGCTTT |
| | GACTTGGGTTTACAGAAGATTGAAGGCTGCTAACGAATCTGATACCTTCC |
| | AAATTTTGAAGCCAATGGATGGTATTGTCAATCCAGGTGAATTATTGGTTG |
| | TTTTGGGTAGACCAGGTTCTGGTTGTACTACTTTGTTGAAGTCCATTTCCT |
| | CTAACACCCATGGTTTCAAGGTTACCGAAGATTCCAAGATTTCTTACTCTG |
| | GTTTGTCCCCAAAGGATATCAAGAGACATTTTAGAGGTGAAGTTGTCTAC |
| | AACGCCGAATCCGATATTCATTTGCCACATTTGACTGTCTACCAAACCTTG |
| | TTGACTGTTGCTAGATTGAAAACCCCACAAAACAGAATTCCAGGTGTCGA |
| | TAGAGAATCTTGGGCTAAACATGTTACTGAAGTTGCTATGGCTACTTACG |
| | GTTTGTCTCATACAAGAAACACAAAGGTTGGTGGTGATTTGGTTAGAGGT |
| | GTTTCTGGTGGTGAAAGAAAGAGAGTTTCTATTGCCGAAGTTACCATTTG |
| | CGGTTCTAAGTTTCAATGTTGGGATAACGCTACCAGAGGTTTAGATTCTG |
| | CTACTGCTTTGGAATTCATTAAGGCCTTGAAAGCTCAAGCCGAAATAGTT |
| | GATTCTGCTGCTTGTGTTGCTATCTACCAATGTTCTCAAGATGCCTACGAT |
| | TTGTTCGATAAGGTTTGTGTCTTGTACTCCGGTTACCAAATCTATTTTGGT |
| | TCTGCTAAGAACGCCAAGAGATACTTTCAACAAATGGGTTACTACTGCCC |
| | ATCTAGACAAACTACTGCTGATTTCTTGACCTCTATTACTTCTCCAGCCGA |
| | AAGAATTATCAACAACGGTTACATTGAGAAGGGTATCAACGTTCCACAAA |
| | CTCCAGAAGAAATGTCTGATTACTGGAAGAACTCTCCAGAATACGAGAAT |
| | TTGGTCAGAGAAACCGACGAATTCATCTCCCAAGATCATAACTCTAAGAT |
| | CAGCTCCATTAGAGAAGCACATCAAGCTAGACAATCTAAGAGAGCTAGAC |
| | CAGCTGAACCATATACTGTTTCTTATTTGATGCAGGTCAAGTACCTGCTGA |
| | TCAGAAACATTTGGAGAATCCAGAACTCCTACTCTATTACCGCTTTCCAAG |
| | TTATCGGTCATTCTGTTATGGCTTTGTTGTTGGGTTCTATGTTCTACAAGG |
| | TTATGAAGCACACTTCTACCGATACCTTTTACTATAGAGGTTCCGCTATGT |
| | TCTTCGCCGTTTTGTTTAATGCTTTCTCCTCCTTGTTGGAAATCTTCAGCTT |
| | GTATGAAGCCAGACCAATTACTGAAAAGCACAGAACCTACTCGTTGTATA |
| | GACCTTCAGCTGATGCTTTCGCTTCCATTTTGTCTGAAATTCCAGCTAAGA |
| | TTTTGACCGCCATCTTCTTTAATTTGGCCTACTACTTCTTGGTCAACTTCA |
| | GACGTGATGGTGGTAGATTTTTCTTCTACTTCCTGATCAACATCGTCGGTA |
| | CTTTCACTATGTCTCATTTGTTCAGATGCGTTGGTTCTTTGACTAAGACTTT |
| | GACTGAAGCTATGATTCCAGCCTCCATCTTGTTGTTAGGTATGGCTATGTA |
| | TGCTGGTTTCGCTATTCCAGAAACTAAGATGTTAGGTTGGTCTAAGTGGA |
| | TCTGGTACATTAACCCATTGTCCTACTTGTTCGAAGCTTTGATGACTAACG |
| | AATTCCACGATAGAAAGTTCCCATGTGCTACTTTTATTCCATCAGGTGGTG |
| | AATACGAACAGTTCAGAGGTAAAGAAAGAATCTGTGGTGTTGTTGGTTCA |
| | GTCCCAGGTGAAAATTATGTATTGGGTGACAACTTCCTGAAAAAGTCCTA |
| | CAACTACGATATCGAACATAAGTGGCGTGCTTTTGGTGTTGGTATGGCAT |
| | ACGTTATTTTCTTTTTCTTCGTGTACCTGTTCCTGTGCGAAATCAATGAAG |
| | GTGCTAAACAAAAGGGTGAGATCTTGGTTTTTCCACAGACTGTTGTTAGA |
| | AAGATGAGGAAGCAAAAGAAGATCAGATCCAGAACAAACGCCTTGAACGA |
| | TTTGGAAAAGAACATCGGTACTAATGCTACCAACTTGACTGATACCACTCT |
| | GGTCAAAGAATCTTCCGATTCTACTGATGAAGTCCAAGAGCAATCTGGTT |
| | TGACAAAGTCTAAGGCTATTTTCCATTGGAGGAACTTGTGCTACGATGTTC |
| | AAATCAAAGCTGAAACCAGAAGGATCTTGTCTGACGTTGATGGTTGGGTT |
| | AAGCCAGGTACTTTAACTGCTTTGATGGGTTCTTCTGGTGCTGGTAAAAC |
| | TACATTATTGGATTGCTTGGCTGAAAGGGTTACTATGGGTGTAATTACCG |
| | GTGATATTTTCGTCAACGGTAAGAGAAGAGATGCCTCATTTCCAAGATCTA |
| | TTGGTTACTGTCAACAACAGGACTTGCATTTGAAAACTGCTACTGTTAGAG |
| | AGTCCTTGTTGTTCTCTGCTATGTTGAGACAACCTAAGAACGTTCCAACTA |
| | GCGAAAAGAAGAAGTACGTTGAAGAAGTCATCAAGATCCTAGAGATGGAA |
| | CCATATGCTGATGCAGTTGTTGGTGTTGCCGGTGAAGGATTGAATGTTGA |
| | ACAGAGAAAAAGATTGACCATCGGTGTTGAATTGGTTGCTAAACCTAAGC |
| | TGTTGGTTTTCTTGGATGAACCTACAAGTGGTTTGGATTCTCAAACAGCTT |
| | GGTCTATTTGCCAGTTGATGAGAAAGTTGGTTAACAGAGGACAAGCTATT |
| | TTGTGCACTATCCATCAACCATCCGCAATCTTGATGCAAGAATTTGATAGG |
| | TTGCTGTTCTTGCAAAAAGGTGGTGAGACTGTTTACTTTGGTGAATTGGG |
| | TGATGAATGCTCCATCATGGTTGATTACTTTGAAAGAAACGGTGCTCATAA |
| | GTGTCCACCAAATGCTAATCCAGCTGAATGGATGTTGGAAGTTGTAGGTG |
| | CTGCTCCAGCTTCTCATGCTAACAAGGATTATCATCAAGTTTGGAAGGAC |
| | TCCAAAGAGTACCAAGAAATTCAATGCGAATTGAACAGGTTGGAGAGGGA |
| | ATTGAAAGATCATGGTAATGAGGATAATGAAGAGGGCCATAAGTCTTACG |
| | CTACCGATATTTTCTCTCAGATCGTTATCGTTTCCCACAGGTTCTTTCAAC |
| | ACTATTGGAGATCACCAAGATACTTGTGGCCAAAGTTGTTTTTGACTGCCT |
| | TCAACGAAATTTTCATCGGCTTCACTTTCTTCAAAGAGAAGCGTTCTTTAC |
| | AGGGTGTTCAAAACCAGATGTTGTCTACCTTTGTCTTTTGCGTTATCTTCA |
| | ACCCAATCTTGCAACAATTCTTGCCAGTTTACGTCGAACAAAGAAACTTGT |
| | ACGAAGCAAGAGAAAGACCATCTAGAACCTTTTCTTGGTTTACCTTCATCG |
| | TGTCCCAAATCATCGTTGAAATTCCTTGGAACTTTTTGGCTGGTACTATTG |
| | CCTTTTTCGTCTACTATTATCCCGTGGGTTTTTACAGAAATGCTTCCGAAG |
| | CTAATCAGTTGCACGAAAGAGGTGCATTATACTGGTTGTTCTGTACAGCA |
| | TTTTTCGTTTGGGTTGGTTCCATGGCTATTTTGGCTAACTCTTTTGTTGAAT |
| | ACGCTGCTGAAGCTTCTAACTTGGCTTTATTGTGTTTCGCTTTCTCTTTGG |
| | CTTTCAACGGTGTTTTAGTTCCACCAAACAAAATGCCTAGGTTTTGGATCT |
| | TCATGCACAGAGTTTCTCCATTGACCTACTACATTGATTCCGCTTTGTCTG |
| | TCGGTATGGCAAATGTTGGTGTAAAATGTTCTGCCTACGAATACGTTCAAT |
| | TCAAGCCACCAGTTAATCAAAACTGCGGTCAATACTTGAACAGCTACATTA |
| | ACTCTACTGGTACTGGTTACTTGGCTAATCCAAACGCTACTGATCAATGTT |
| | CTTTCTGCCCAATTTCCGAAACTAACGTTTACTTGGAAACTAGGGGCTCCT |
| | ATTACAAACATAGATGGCGTAACTACGGTATCTTCTTGTGTTTCATTGCCT |
| | TCGATTATGTTGCCGCCATTTTCTTATATTGGTTGGCTAGAGTTCCAAAGG |
| | GTAACAGAGTTAGCAAGAAAATCAAGTAA |
| SEQ ID | MDKDNENEIEEPNGYEVSSASGRYEGLDQTAAQSIKDLAQSLLEESRESIHA |
| NO: 982 | AGEGVNPVFMSESGDDYNPKVDPANDEFSSKEWIKNLSTIIKSDPSFYKPYT |
| | LGCSWRDLSAVGASADVAYQTTFENLPWKALTWVYRRLKAANESDTFQILK |
| | PMDGIVNPGELLVVLGRPGSGCTTLLKSISSNTHGFKVTEDSKISYSGLSPKDI |
| | KRHFRGEVVYNAESDIHLPHLTVYQTLLTVARLKTPQNRIPGVDRESWAKHV |
| | TEVAMATYGLSHTRNTKVGGDLVRGVSGGERKRVSIAEVTICGSKFQCWDN |
| | ATRGLDSATALEFIKALKAQAEIVDSAACVAIYQCSQDAYDLFDKVCVLYSGY |
| | QIYFGSAKNAKRYFQQMGYYCPSRQTTADFLTSITSPAERIINNGYIEKGINVP |
| | QTPEEMSDYWKNSPEYENLVRETDEFISQDHNSKISSIREAHQARQSKRARP |
| | AEPYTVSYLMQVKYLLIRNIWRIQNSYSITAFQVIGHSVMALLLGSMFYKVMK |
| | HTSTDTFYYRGSAMFFAVLFNAFSSLLEIFSLYEARPITEKHRTYSLYRPSADA |
| | FASILSEIPAKILTAIFFNLAYYFLVNFRRDGGRFFFYFLINIVGTFTMSHLFRCV |
| | GSLTKTLTEAMIPASILLLGMAMYAGFAIPETKMLGWSKWIWYINPLSYLFEAL |
| | MTNEFHDRKFPCATFIPSGGEYEQFRGKERICGVVGSVPGENYVLGDNFLK |
| | KSYNYDIEHKWRAFGVGMAYVIFFFFVYLFLCEINEGAKQKGEILVFPQTVVR |
| | KMRKQKKIRSRTNALNDLEKNIGTNATNLTDTTLVKESSDSTDEVQEQSGLT |
| | KSKAIFHWRNLCYDVQIKAETRRILSDVDGWVKPGTLTALMGSSGAGKTTLL |
| | DCLAERVTMGVITGDIFVNGKRRDASFPRSIGYCQQQDLHLKTATVRESLLFS |
| | AMLRQPKNVPTSEKKKYVEEVIKILEMEPYADAVVGVAGEGLNVEQRKRLTI |
| | GVELVAKPKLLVFLDEPTSGLDSQTAWSICQLMRKLVNRGQAILCTIHQPSAIL |
| | MQEFDRLLFLQKGGETVYFGELGDECSIMVDYFERNGAHKCPPNANPAEW |
| | MLEVVGAAPASHANKDYHQVWKDSKEYQEIQCELNRLERELKDHGNEDNE |
| | EGHKSYATDIFSQIVIVSHRFFQHYWRSPRYLWPKLFLTAFNEIFIGFTFFKEK |
| | RSLQGVQNQMLSTFVFCVIFNPILQQFLPVYVEQRNLYEARERPSRTFSWFT |
| | FIVSQIIVEIPWNFLAGTIAFFVYYYPVGFYRNASEANQLHERGALYWLFCTAF |
| | FVWVGSMAILANSFVEYAAEASNLALLCFAFSLAFNGVLVPPNKMPRFWIFM |
| | HRVSPLTYYIDSALSVGMANVGVKCSAYEYVQFKPPVNQNCGQYLNSYINST |
| | GTGYLANPNATDQCSFCPISETNVYLETRGSYYKHRWRNYGIFLCFIAFDYV |
| | AAIFLYWLARVPKGNRVSKKIK- |
| SEQ ID | ATGTCCGAGAAGCCAGATATTGCTGAAAACTCTGCTTCTATTGATGATGA |
| NO: 983 | CGCTTCCTCTTCTCAATCCAACTTGCATGAATACCATGGTTTCGATTACGA |
| | TGCCGAACAAAGAGTTAGAGATTTGGCTAGATCTTTGACCCATCAATCCG |
| | GTAACATTTCCACCTACTCTAATCAAGATGCTGCCACCGAATCTATTTTCA |
| | CTCCAGATATGGAAGGTATCAACCCAATCTTCACTAACAAAGAAGCTGAA |
| | GAGTACAACGAAAAGTTGGATCCTACTTCCGAAAACTTCTCATCTAAAGCT |
| | TGGGTTCAAAACATGGCTAACGTTGTTACTTCTGACCCAGAATTTTACAAG |
| | CCATACTCTTTGGGTTGTGTCTGGAAAAATTTGTCTGCTTCTGGTGAATCT |
| | TCCGATGTTGCTTATCAATCTACCGTTTTGAACATGCCCTACAAGTTGTTG |
| | AATTCCGCTTTTAGAAAAGCCAGATCTACCAAGACTGAAGATAGATTCCAA |
| | ATCTTGAAGCCAATGGATGGTTGTTTGAACCCTGGTGAATTATTGGTTGTT |
| | TTGGGTAGACCAGGTTCTGGTTGTACTACTTTGTTGAAGTCCATTTCCTCT |
| | AACACTCACGGTTTTGATGTTGGTGAAGATAGCGTTTTGTCTTACGCTGG |
| | TTTTACACCAGATGACATCAAAAAGCACTACAGAGGTGAAGTTGTTTACAA |
| | CGCTGAAGCCGATATTCATTTGCCACATTTGACTGTTTACGAAACCTTGTA |
| | CACCGTGTCTAGATTGAAAACTCCACAGAATAGAATCAAGGGTGTTGATA |
| | GAGATACCTTCGCTAGACATTTGACCGAAGTTGCTATGGCTACTTATGGT |
| | TTGTCTCATACCAGAAACACTAAGGTTGGTGATGATTTCGTTAGAGGTGTT |
| | TCAGGTGGTGAAAGAAAGAGAGTTTCAATTGCCGAAGTTTCCATTTGCGG |
| | TTCTAAGTTTCAATGTTGGGATAACGCTACTAGAGGTTTGGATTCTGCTAC |
| | TGCTTTGGAATTCATTAGAGCCTTGAAAACCCAAGCCACTATTGCTTCATC |
| | TGCTGCTACTGTTGCTATCTACCAATGTTCACAAGATGCCTACGATTTGTT |
| | CGATAAGGTTTGTGTTTTGGACGGTGGTTACCAAATCTACTTTGGTCCAG |
| | GTAATGAAGCCAAAAAGTACTTCGAAGATATGGGTTACAAGTGCCCAGAT |
| | AGACAAACTACTGCTGATTTCTTGACTTCTGTTACATCTCCAGCCGAAAGA |
| | ATCATTAACCCAGATTTCATTAAGAGGGGTATTGCCGTTCCACAAACTCCA |
| | AAGGATATGGGTGAATACTGGTTGAAGTCTCAAAACTACAAGGACCTGAT |
| | GAAGGAAATCGACCAAAAGTTGAACAACGACAACATCGAAGAATCTAGAA |
| | CCGCTGTAAAAGAAGCTCATATTGCCAAGCAATCTAAGAGAGCTAGACCA |
| | TCTTCTCCATACACTGTTTCTTATATGTTGCAGGTCAAGTACCTGCTGACT |
| | AGAAACTTTTGGAGAATTAGAAACAACGCCGGTGTGTCCTTGTTCATGATT |
| | ATTGGTAATTCTGCCATGGCCTTCATCTTGGGTTCTATGTTTTACAAGGTT |
| | ATGAAGAAGGGTGACACCTCTACTTTTTACTTTAGAGGTGCTGCTATGTTC |
| | TTCGCCGTTTTGTTTAATGCTTTCTCGTCCTTGTTGGAGATCTTCACATTAT |
| | ATGAAGCCAGACCAATTACCGAAAAGCACAGAACTTACAGCTTGTATCAT |
| | CCATCTGCTGATGCTTTGGCTTCTGTTTTCTCTGAATTGCCAACTAAGTGC |
| | ATTATCGCTGTTTGCTTCAACATCATCTTCTATTTCTTGGTCGACTTCAAGA |
| | GAAACGGCGATACTTTCTTTTTCTACCTGTTGATGAACGTCTTGGGTGTCT |
| | TGTCTATGTCTCATTTGTTTAGATGCGTTGGCTCTTTGACTAAGACTTTGT |
| | CTGAAGCTATGGTTCCAGCTTCTATGTTGTTGTTGGCTTTGTCAATGTTTA |
| | CCGGTTTCGCTATTCCAAAGACCAAAATGTTAGGTTGGTCTGAATGGATC |
| | TGGTACATCAATCCATTGTCCTACTTGTTCGAGTCCTTGATGATTAACGAA |
| | TTCCACGGTAGAAGATTCGCTTGTGCTCAATTTGTTCCATTTGGTCCTGCT |
| | TACGCTAACATTAACGGTACAAACAGAATTTGCTCTACCGTTGGTGCTGTA |
| | GCTGGTCAAGATTATGTTTTAGGTGACGACTTCGTCAAAGAGTCTTACGG |
| | TTACGAACACAAACATAAGTGGCGTTCTTTAGGTATTGGTTTGGCCTACGT |
| | TATCTTCTTCTTGTTCTTGTACTTGGTCTTGTGCGAATTCAATGGTGGTGC |
| | TAAACAAAAGGGTGAGATTTTGGTTTTCCCACAGGGTATTATCCGTAAGAT |
| | GAAGAAGCAAGGTAAGATCCAAGAAAAGAAAGCTGCCGGTGATATTGAAA |
| | ATGCTGGTGGTTCAAATGTTTCCGACAAGCAATTATTGAACGATACCTCC |
| | GAAGATTCCGAGGATTCTAATTCAGGTGTTGGTATCTCAAAGTCCGAAGC |
| | CATTTTTCATTGGAGAAACTTGTGTTACGACGTCCAAATCAAAACTGAAAC |
| | CAGAAGGATCCTGAACAACGTTGATGGTTGGGTTAAGCCAGGTACTTTGA |
| | CTGCTTTGATGGGTGCTTCAGGTGCAGGTAAAACTACTTTATTGGATTGC |
| | TTAGCTGAAAGGGTTACCATGGGTGTTATTACTGGTGAAGTTTCTGTCAAT |
| | GGCAGATTGAGAGATGAATCTTTCCCAAGATCTATCGGTTACTGTCAACA |
| | ACAAGACTTGCACTTGAAAACATCTACCGTCAGAGAATCCTTGAGATTCTC |
| | TGCTTATTTGAGACAACCATCGGATGTTTCCATTGAAGAGAAGAACAAGTA |
| | CGTCGAGGAAATCATTAAGATCTTGGAGATGGAAAAGTACGCTGATGCTG |
| | TTGTTGGTGTTGCTGGTGAAGGTTTGAATGTTGAACAGAGAAAAAGATTG |
| | ACCATCGGTGTTGAATTGGCTGCTAAACCTAAGTTGTTGGTCTTTTTGGAT |
| | GAACCTACATCTGGTTTGGATAGTCAAACTGCTTGGTCTATTTGCCAGCT |
| | GATGAAGAAACTAGCTGATCATGGTCAAGCTATTTTGTGCACTATTCATCA |
| | ACCATCCGCCATCTTGATGCAAGAATTTGATAGGTTGTTGTTCATGCAGA |
| | GAGGTGGTAAAACTGTTTACTTTGGTGACTTAGGTAAGGGTTGCCAAACC |
| | ATGATTGATTACTTTGAAAGAAACGGCTCTCATAAGTGTCCACCAGATGCT |
| | AATCCTGCAGAATGGATGTTGGAAGTTGTCGGTGCTGCTCCAGGTTCTCA |
| | TGCAAATCAAGATTACTATGAAGTCTGGCGTAATTCCGCTGAGTACAAAG |
| | CTGTTCATGAAGAATTGGAATGGATGGCTACTGAGTTGCCAAAGAAATCT |
| | CCAGAAACAAGTGCTGACGAACAACATGAATTCGCTACTTCTATCTTGTAC |
| | CAGTCTAAGTTGGTTTGTCGTAGATTGGGTGAACAGTATTGGAGATCACC |
| | AGAATATTTGTGGTCCAAGTTCATCCTGACTATCTTTAACCAGTTGTTCAT |
| | CGGTTTCACTTTCTTCAAGGCTGATACTTCTTTACAGGGCTTGCAAAATCA |
| | AATGTTGGCCATTTTCATGTTCACCGTCATCTTCAATCCTATCTTGCAACA |
| | ATACTTGCCAACCTTTGTTCAACAGAGAGACTTGTACGAAGCTAGAGAAA |
| | GACCATCTAGAACTTTTTCTTGGCTGGCTTTCATTATCTCCCAAATCGTTG |
| | TTGAAATCCCCTGGAATTTGTTGGCTGGTACAATTGCTTACTTTATCTACT |
| | ACTACCCAATCGGCTTTTACAGAAATGCTTCTGAAGCAGGTCAATTGCAC |
| | GAAAGAGGTGCTTTGTTTTGGTTGTTCTCTTGTGCTTACTACGTCTACATT |
| | GGTTCTATGGGTTTGATGTGCATCAGCTTCAACGAAATTGCAGAAAATGC |
| | AGCTAACACCGCTTCTTTGATGTTTACTATGGCCTTGTCTTTCTGTGGTGT |
| | TATGACTACTCCATCTAACATGCCAAGATTCTGGATCTTCATGTACAGAGT |
| | TTCACCTTTGACCTACTTGATTGATGCCTTGTTGTCTGTTGGTGTCGCTAA |
| | TGTTGATGCTCATTGCTCTGATTATGAGTTGTTGAGATTTGCTCCAGCTAA |
| | CGGTATGACTTGTGGTGAGTATATGGCTCCTTACATTCAATCTGTTGGTAC |
| | TGGTTACTTGAAGGATTCTTCTGCTACAGATGAATGTGCTTTCTGTACTGT |
| | TTCTGACACCAATTCTTACTTGGCCTCTGTTTCATCTCATTACAAGAATAG |
| | ATGGCGTAACTTCGGTATCTTCATTTGCTTTATTGCCTTCAACTACATGGC |
| | CGGTATTCTGTTTTATTACTTGGCTAGAGTTCCCAAGAAAGGTAACGGTTT |
| | GTTTTCGAAGTTCAAGAAGTAA |
| SEQ ID | MSEKPDIAENSASIDDDASSSQSNLHEYHGFDYDAEQRVRDLARSLTHQSG |
| NO: 984 | NISTYSNQDAATESIFTPDMEGINPIFTNKEAEEYNEKLDPTSENFSSKAWVQ |
| | NMANVVTSDPEFYKPYSLGCVWKNLSASGESSDVAYQSTVLNMPYKLLNSA |
| | FRKARSTKTEDRFQILKPMDGCLNPGELLVVLGRPGSGCTTLLKSISSNTHGF |
| | DVGEDSVLSYAGFTPDDIKKHYRGEVVYNAEADIHLPHLTVYETLYTVSRLKT |
| | PQNRIKGVDRDTFARHLTEVAMATYGLSHTRNTKVGDDFVRGVSGGERKRV |
| | SIAEVSICGSKFQCWDNATRGLDSATALEFIRALKTQATIASSAATVAIYQCSQ |
| | DAYDLFDKVCVLDGGYQIYFGPGNEAKKYFEDMGYKCPDRQTTADFLTSVT |
| | SPAERIINPDFIKRGIAVPQTPKDMGEYWLKSQNYKDLMKEIDQKLNNDNIEE |
| | SRTAVKEAHIAKQSKRARPSSPYTVSYMLQVKYLLTRNFWRIRNNAGVSLFM |
| | IIGNSAMAFILGSMFYKVMKKGDTSTFYFRGAAMFFAVLFNAFSSLLEIFTLYE |
| | ARPITEKHRTYSLYHPSADALASVFSELPTKCIIAVCFNIIFYFLVDFKRNGDTF |
| | FFYLLMNVLGVLSMSHLFRCVGSLTKTLSEAMVPASMLLLALSMFTGFAIPKT |
| | KMLGWSEWIWYINPLSYLFESLMINEFHGRRFACAQFVPFGPAYANINGTNRI |
| | CSTVGAVAGQDYVLGDDFVKESYGYEHKHKWRSLGIGLAYVIFFLFLYLVLC |
| | EFNGGAKQKGEILVFPQGIIRKMKKQGKIQEKKAAGDIENAGGSNVSDKQLL |
| | NDTSEDSEDSNSGVGISKSEAIFHWRNLCYDVQIKTETRRILNNVDGWVKPG |
| | TLTALMGASGAGKTTLLDCLAERVTMGVITGEVSVNGRLRDESFPRSIGYCQ |
| | QQDLHLKTSTVRESLRFSAYLRQPSDVSIEEKNKYVEEIIKILEMEKYADAVVG |
| | VAGEGLNVEQRKRLTIGVELAAKPKLLVFLDEPTSGLDSQTAWSICQLMKKLA |
| | DHGQAILCTIHQPSAILMQEFDRLLFMQRGGKTVYFGDLGKGCQTMIDYFER |
| | NGSHKCPPDANPAEWMLEVVGAAPGSHANQDYYEVWRNSAEYKAVHEELE |
| | WMATELPKKSPETSADEQHEFATSILYQSKLVCRRLGEQYWRSPEYLWSKFI |
| | LTIFNQLFIGFTFFKADTSLQGLQNQMLAIFMFTVIFNPILQQYLPTFVQQRDLY |
| | EARERPSRTFSWLAFIISQIVVEIPWNLLAGTIAYFIYYYPIGFYRNASEAGQLH |
| | ERGALFWLFSCAYYVYIGSMGLMCISFNEIAENAANTASLMFTMALSFCGVM |
| | TTPSNMPRFWIFMYRVSPLTYLIDALLSVGVANVDAHCSDYELLRFAPANGM |
| | TCGEYMAPYIQSVGTGYLKDSSATDECAFCTVSDTNSYLASVSSHYKNRWR |
| | NFGIFICFIAFNYMAGILFYYLARVPKKGNGLFSKFKK- |
| SEQ ID | ATGACCGAGAACATCCACTTGGGTGATCAAGTTTCTAAAACCTCTGCTCAATCTGTC |
| NO: 985 | GAAGAGTACAAGGGTTTTGATTCCAACGTTGATGATAACATCCAACACTTGGCTAG |
| | AAAGTTGACTAACGCTTCTCAATCTTCTTTGCCAGCTGCTGCTGGTGAAGATCAACA |
| | ATATTACCAAAACAACAACGACTTGGAAGCCCAACAATCTTTGTCTAGAGTTTCTAC |
| | TATTGCCCCAGGTGTTGTTGCTATTAACAACCCAGATATTGATCCAAGATTGGACCC |
| | AAACTCTGACCAATTCAATTCTAGATTCTGGGTCAAGAACTTCAAGAACCTGATGGA |
| | TAAGGATCCAGAACACTACAAGTCTTACTCATTGGGTATTGCCTACAAGAACTTGAG |
| | AGCTACTGGTGAAGCAGCTGGTGCTGATTATCAAACTACTGTTATGAATGCCCCATT |
| | GAAGTACGCTAATTTGGCTAAGAAGGCTTTCTTCACTTCCAAGGCTAAGAAAGAAG |
| | CTGGTAGATTCGATATCTTGAAGTCCATGGATGCTTTGGTTAGACCAGGTGAAGTT |
| | GTTGTTGTCTTAGGTAGACCTGGTTCTGGTTGTTCTACTCTGTTGAAAACTATTGCCT |
| | CTAACACTCATGGTTTCGCCATTGGTGAAGAGGCTGAAATTTCTTATGAAGGCTTGT |
| | CCCCAAAGGATATCAGAAAACATTATAGAGGTGAGGTTGTCTACAACGCCGAATCT |
| | GATATTCATTTCCCACATTTGACTGTCTGGCAAACTTTGTCTACTGTTGCTAAATTCA |
| | GAACCCCACAAAACAGAATTCCAGGTATCTCAAGAGAAGATTACGCTAACCATTTG |
| | ACCGAAGTTTACATGGCTACTTATGGTTTGTCTCATACCAAGAACACTAAGGTCGGT |
| | AACGAAAATGTTAGAGGTGTTTCTGGTGGTGAAAGAAAGAGAGTTTCAATTGCCGA |
| | AGTTTCTTTGTCTGGTGCTAGATTGCAATGTTGGGATAATGCTACTAGAGGTTTGGA |
| | TGCTGCTACTGCTTTGGAATTCATTAGAGCTTTGAGAACCCAAGCTGATGTTTTGGA |
| | TACAACTGCTTTCGTTGCTATCTACCAATGTTCTCAAGATGCCTACGATTTGTTCGAT |
| | AAGGTTACTGTCTTGTACGAAGGTCACCAAATCTATTTTGGTAGAGGTGATGAAGC |
| | CAGGGAATACTTTATTAAGATGGGTTGGTATTGCCCTCAAAGACAAACTACAGCTG |
| | ATTTCTTGACTTCTGTTACCTCTCCAAGAGAAAGAGTTCCACAAGAAGGTTTCGAAA |
| | ACAAGGTTCCAAAAACTCCACAAGAGTTCGAAACTTACTGGAAGAACTCTCCAGAA |
| | TACGCCAAGTTGATTAAGGATATCGACTCTGAATTCAAGCACCAACACGAACAAAA |
| | CTCTAAAGGTTTGGTCAAAGAAGCCCACAACAAGAAGCAAGCCAAACATATTAGAC |
| | CAACCTCTTCATACACTGTGTCTTTCTGGATGCAAACCAGATACTTGTTGACCAGAG |
| | ATTTCCAAAGAATCTGGAACGATTTCGGCTTCAACTCTTTTCAAGTTTTCGCCAATTC |
| | TTTCATGGCCCTGATTTTGTCCTCTATCTTTTACAACTTGCCAAAGACCACCGACTCA |
| | TTTTACTACAGAGGTGCTGCTATGTTTTTCGCCGTTTTGTTTAATGGCTTCTCGTCCTT |
| | CTTGGAAATCATGACTTTGTTTGAAGCCAGACCAATCATCGAAAAGCACAAGCAAT |
| | ACTCGTTGTATCATCCATCTGCTAACGCTTTGTCATCCGTTTTGTCTCAATTGCCAGC |
| | TAAGATCTTTACCTCCATTGCTTTCAACCTGGTCTTTTACTTCATGGTCAACTTCAGAA |
| | GAAACCCAGGTAGATTCTTCTTCTACTACTTGGTTAACTTGACCGCTACCTTCTCTAT |
| | GTCTCATTTGTTTAGATTGGTTGGTTCTGCTGCTACATCTTTACCAGAAGCTTTGGTT |
| | CCAGCTCAAGTTTTGTTGTTGGCTTTGACTATTTTCGTCGGTTTCACCATTCCAGTCA |
| | ACTATATGTTAGGTTGGTCCAGATGGATCAACTACTTGGATCCATTGGCTTATGCTT |
| | TCGAAGCTTTGATGGCAAATGAATTCGCTGGTGTTACTTACGATTGCTCATCTTTTGT |
| | TCCAGGTGACCCAAGATCTATTCCAAACATTCCATCTGATGGTTTCATCTGCAATGCT |
| | GTTGGTGCACAAACTGGTGAGTTTACTGTTGATGGTACTACCTATTTGGAAGTCGCT |
| | TACAAGTACAAGAATTCCCATAGATGGCGTAACTGGGGTATTACTTTAGCTTTTGCT |
| | TTGTTCTTCCTGGCCATCTACTTAGTTTTCTCTGAGTACAATGAATCCGCCATGCAAA |
| | AGGGTGAAGTCTTGTTATTTCAAAGGTCCACCTTGCGTAAGCTGAAGAAAGAAAAA |
| | GCTGCTTCCCAAAACGAATTGGAGTCTGGTAATGAGAAGGGTGTTGTTCCAAACGG |
| | TGAAGATGTTGATAAGGATGTTGATGTTATTCACGCTGGTACTCAAACTTTCCATTG |
| | GAGAGATGTTCATTACACCGTCAAGATCAAGAAAGAGGACAGAGAAATTTTGTCAG |
| | GTGTTGACGGTTGGGTTAAGCCAGGTACTTTGACTGCTTTAATGGGTGCTTCTGGT |
| | GCTGGTAAAACTACCTTGTTAGATGTCTTGGCTAACAGAGTTACTATGGGTGTTGTA |
| | ACTGGTGATATGTTCGTTAACGGTCACTTGAGAGATAACAGCTTCCAAAGATCTACT |
| | GGTTACGTTCAACAACAGGACTTGCATTTGAGAACTGCTACTGTTAGAGAAGCCTT |
| | GAAGTTTTCTGCTTACTTGAGACAACCAGCCTCTGTTTCTACTGCTGAAAAAGATCA |
| | ATACGTCGAAGAGGTCATCTCCATTTTGGATATGGAAAAGTATGCTGATGCCGTTGT |
| | TGGTGTTGCCGGTGAAGGTTTGAATGTTGAACAGAGAAAAAGATTGACCATCGGT |
| | GTTGAATTGGCTGCTAAACCTAAGCTGTTGTTATTCTTGGATGAACCTACCTCTGGT |
| | TTGGATTCTCAAACTGCTTGGTCTATTTGCCAGTTGATGAGAAAATTGGCTAACCAT |
| | GGTCAAGCCATTTTGTGTACTATTCATCAACCATCCGCCATCTTGATGCAAGAATTTG |
| | ATAGACTGTTGTTCTTGGCCAGAGGTGGTAAGACTGTTTATTTTGGTGATTTGGGTA |
| | AGAATTGCCAGACCTTGATTGACTACTTTGAAAAGTACGGTGCTCCAAAATGTCCAC |
| | CTGAAGCTAATCCAGCTGAATGGATGTTACATGTTATTGGTGCTGCTCCAGGTTCTC |
| | ATGCTAATCAAGATTATTACCAAGTCTGGTTGAACTCCACCGAAAGACAAGAAGTTA |
| | AGCAAGAATTGGACAGGATGGAAAGAGAATTGTCCCAATTACCAAGAGATGATTCC |
| | ATCGATCATAACGAATACGCTGCTCCATTCTGGAAACAATATGGTATCGTTACCCAA |
| | AGAGTGTTCCAACAGTATTGGAGATCACCAATCTACATCTACTCCAAGTTGTTCCTA |
| | GCTATCTCCTCTTCTATGTTTATCGGTTTTGCTTTCTTTAAGGCCAAGAATACCAGAC |
| | AAGGCTTGCAAAATCAAATGTTCGCTCTGTTCATGTTCCTGGTTATTTTCAACGCCTT |
| | GATCCAACAAACATTGCCTGAATATGTTAGACAGAGAGAGTTGTACGAGGTTAGAG |
| | AAAGACCATCTAAGACTTTTTCATGGAAGGCCTTTATTACCGCTCAAATCACATCTG |
| | AAGTTCCTTGGAATGCTCTGGTTGGTACTATTGCATTTTTGGTGTTTTATTACCCAGT |
| | CGGCTTCTACAACAATGCTGCTCCTAATGGTAGTGCTGAAGTTCATGATAGAGGTG |
| | CTTACGCTTGGTTTTTGACAGTTTTGTTTTTCGTCTACACCGGTTCTTTCGCCCATTTG |
| | GTTATTGCTCCATTGGAATTAGCTGATGCTGCAGGTAATTTGGCCTCTTTGATTTTCA |
| | CTTTGTGCTTGACTTTCTGCGGTGTTTTGGTTACATCAGAAGGTTTGCCAGGTTTCTG |
| | GATTTTCATGTATAGAGTCTCTCCATTCACCTACTTCATTGACGGTTTCTTGTCTAAT |
| | GCCGTTGCTCATAATGTTGTTAAGTGCTCCGATTCCGAATTGGTTCATTTTTCACCTC |
| | CACAAGGTGCTACTTGTGGTGATTATATGAAGGAATACTTGGAAAAGGCTGGTACA |
| | GGTTATGTTGAAGATCCATCTTCTACATCTGAATGCGGTTTCTGCTCTATTTCTTCTA |
| | CAGATGCCTTTTTGAAGGTCGTCAAATTGGATTATGGTAGACGTTGGAGAAACGTC |
| | GGTATTTTCATTGCCTTCATCGTTATCAACTGGATCTTGGCCGTTTTCTTTTATTGGTT |
| | GGCTAGAGTCCCAAAGAAGAACGATAGAGTTAAGTCAGGTGCTGAAGCTGAATCT |
| | ACAAACAAGACCGTTCAAAAGCAAGAAACTGCCTCCATTATCGAGAAAGAAGAGTC |
| | ATCTTCTAACTCCAAGGCTTAA |
| SEQ ID | MTENIHLGDQVSKTSAQSVEEYKGFDSNVDDNIQHLARKLTNASQSSLPAAAGEDQQ |
| NO: 986 | YYQNNNDLEAQQSLSRVSTIAPGVVAINNPDIDPRLDPNSDQFNSRFWVKNFKNLMD |
| | KDPEHYKSYSLGIAYKNLRATGEAAGADYQTTVMNAPLKYANLAKKAFFTSKAKKEAGR |
| | FDILKSMDALVRPGEVVVVLGRPGSGCSTLLKTIASNTHGFAIGEEAEISYEGLSPKDIRK |
| | HYRGEVVYNAESDIHFPHLTVWQTLSTVAKFRTPQNRIPGISREDYANHLTEVYMATYG |
| | LSHTKNTKVGNENVRGVSGGERKRVSIAEVSLSGARLQCWDNATRGLDAATALEFIRAL |
| | RTQADVLDTTAFVAIYQCSQDAYDLFDKVTVLYEGHQIYFGRGDEAREYFIKMGWYCP |
| | QRQTTADFLTSVTSPRERVPQEGFENKVPKTPQEFETYWKNSPEYAKLIKDIDSEFKHQ |
| | HEQNSKGLVKEAHNKKQAKHIRPTSSYTVSFWMQTRYLLTRDFQRIWNDFGFNSFQV |
| | FANSFMALILSSIFYNLPKTTDSFYYRGAAMFFAVLFNGFSSFLEIMTLFEARPIIEKHKQY |
| | SLYHPSANALSSVLSQLPAKIFTSIAFNLVFYFMVNFRRNPGRFFFYYLVNLTATFSMSHL |
| | FRLVGSAATSLPEALVPAQVLLLALTIFVGFTIPVNYMLGWSRWINYLDPLAYAFEALMA |
| | NEFAGVTYDCSSFVPGDPRSIPNIPSDGFICNAVGAQTGEFTVDGTTYLEVAYKYKNSHR |
| | WRNWGITLAFALFFLAIYLVFSEYNESAMQKGEVLLFQRSTLRKLKKEKAASQNELESGN |
| | EKGVVPNGEDVDKDVDVIHAGTQTFHWRDVHYTVKIKKEDREILSGVDGWVKPGTLT |
| | ALMGASGAGKTTLLDVLANRVTMGVVTGDMFVNGHLRDNSFQRSTGYVQQQDLHL |
| | RTATVREALKFSAYLRQPASVSTAEKDQYVEEVISILDMEKYADAVVGVAGEGLNVEQR |
| | KRLTIGVELAAKPKLLLFLDEPTSGLDSQTAWSICQLMRKLANHGQAILCTIHQPSAILM |
| | QEFDRLLFLARGGKTVYFGDLGKNCQTLIDYFEKYGAPKCPPEANPAEWMLHVIGAAP |
| | GSHANQDYYQVWLNSTERQEVKQELDRMERELSQLPRDDSIDHNEYAAPFWKQYGIV |
| | TQRVFQQYWRSPIYIYSKLFLAISSSMFIGFAFFKAKNTRQGLQNQMFALFMFLVIFNAL |
| | IQQTLPEYVRQRELYEVRERPSKTFSWKAFITAQITSEVPWNALVGTIAFLVFYYPVGFYN |
| | NAAPNGSAEVHDRGAYAWFLTVLFFVYTGSFAHLVIAPLELADAAGNLASLIFTLCLTFC |
| | GVLVTSEGLPGFWIFMYRVSPFTYFIDGFLSNAVAHNVVKCSDSELVHFSPPQGATCGD |
| | YMKEYLEKAGTGYVEDPSSTSECGFCSISSTDAFLKVVKLDYGRRWRNVGIFIAFIVINWI |
| | LAVFFYWLARVPKKNDRVKSGAEAESTNKTVQKQETASIIEKEESSSNSKA |
| SEQ ID | ATGGTTGATAACGTTGCTCCAAACGGTGCTTCTTACCAAAACAACAATATCGGTAAC |
| NO: 987 | GAAATGGCCGCCGATGATATTTCTGAACAAGCTTCTTCACCAGGTGTTTACAGAGGT |
| | TTTGAATCTGGTGCTCAACAATCCGTTAGAAACTTGGCTAGATCTTTGACTAACAGA |
| | TCTGGTGATGCTGTTTCTATGGCTGCTGATTGGAACACTATTAACCCAGTTTTCTCTA |
| | CCGTTGAGTCTCCATCTTATGATCCAAGATTGGACCCAAACTCTGACGAATTTTCTTC |
| | TTCTTTGTGGGTCCAAAACCTGTCTCAATTGGTTTCTTCTAACCCAGATCACTACAAG |
| | CCATATTCTTTGGGTTGTTCTTGGAGAAACTTGAGAGCTTACGGTAACTCTACTGAT |
| | GTTGCTTACCAATCCACTGTTGTTAACTTGCCATTGCAATTGGTTGAATACGTCTATA |
| | GAGCTGCTAGAAAAGCTAGACCAGAAGATACCTTCGATATCTTGAAACCTATGGAT |
| | GGTATGGTTAAGCCAGGTGAATTATTGGTTGTATTGGGTAGACCAGGTTCTGGTTG |
| | TTCTACTTTGTTGAAGTCTATCTCCTCTAACACCCATGGTTTCCATATCGACAAAGAA |
| | TCCGAAATCTCTTACGATGGCTTGTCCCCAAAAGAAATCTCTAGACATTATAGAGGT |
| | GAGGTTGTTTACAACGCTGAAGCTGATGTTCATTTCCCACATTTGTCTGTTTTCGACA |
| | CCTTGAAAACTGTTGCTAGATTAGCTTGTCCTACCAACAGAATCCAAGGTGTTGATA |
| | GAGAAACTTTCGCTACCCATATTACCGAAGTTGCTATGGCTACTTATGGTTTGTCTCA |
| | TACCAGAAACACTAAGGTGGGTAACGAATTGGTTAGAGGTGTTTCAGGTGGTGAA |
| | AGAAAGAGAGTTTCTATTGCCGAAGTCTCTATTTGCGGTTCTAAGTTTCAATGTTGG |
| | GATAACGCTACTAGAGGTTTGGATTCAGCTACTGCTTTGGAATTCATTAGAGCTTTG |
| | AGAACCCAAGCTAAGATGACTAGATCTTCTGCTGTTATTGCTATCTACCAATGCTCTC |
| | AAGATGCCTACGATTTGTTCGATAAGGTTTCTGTTTTACACGAGGGTTACCAAATCT |
| | ACTTCGGTAGAGCTAAAGAAGCCAAGCAATACTTCCAAGATATGGGTTATGTTTGC |
| | CCAGATAGACAAACTACTGCTGATTTCTTGACTGCTGTTACTAATCCAGCCGAAAGA |
| | ATCTTGAATGAGGATATGGTAAAGGCCGGTAAGAAGATTCCATTAACTGCTGCTGA |
| | AATGGAAGCTCATTGGAAACAATCTGAAGCTTACAAGGGTTTGTTGCAAGAAATCG |
| | ATTACTACTCTACCCATGATCAAGCCAACAACAGACAACAATTGAAAGAAGCTCACG |
| | TCGCTAAGCAATCTAAAAAGGCTAGAGCACAATCTCCATACACTGTCTCTTACGGTT |
| | TACAGGTTAAGTACCTGTTGATCAGAAACATGCAGAGGATTAGAAACAACATGGGT |
| | ATCACCTTGTTCCAAGTTATTGGTAATGGTGGCATGTCCTTCATTTTGGGTTCTATGT |
| | TTTACAAGGCTTTGAAGCACGATGATACCGCTGGTTTTTATTCTAGAGCTGGTGCTT |
| | TGTTTTTCGCCGTTTTGTTTAATGCTTTCAGCTGCATGTTGGAAATCTTGGCATTATA |
| | TGAAGCCAGGCCAATCTCCGAAAAACACAAGAGATATTCCTTGTACCATCCTTCTGC |
| | TGATGCTATGGCATCTGTTATTTCAGAAATTCCAGCTAAGCTGTTGACCTCTTTGACT |
| | TTCAATTTGGCTATGTACTTCCTGTGCAACTTTAAAAGAGAAGCTGGCGCTTTCTTCT |
| | TTTACTTCTTGATGACTATGGTTGGCACCTTTGCTATGTCCCATATTTTCAGATGTTTA |
| | GGTGCTTCCACTAAGACCTATGCTGAATCTATGGTTCCAGCTTCTTTGTTGTTGTTAG |
| | CTTTGGCTATCTACACCGGTTTTGCTATTCCAAAGACCAAGATTTTAGGTTGGGCTA |
| | AATGGATCTGGTACATCAATCCATTGTCCTACATCTTCGAATCCTTGATGGTTAACG |
| | AATTCCACGGTAGACAATTCAAGTGCTCTCAATTTGTTCCAGCTGGTCCAGGTTACG |
| | AAAATGTTAGTGGTACTCAAAGAGTTTGCTCTGCTGTTGGTGCTTTACCAGGTGAAG |
| | ATTACGTTTCTGGTGAAAGGTATATTAACGTCGCCTACAACTATTACCATTCTCATAA |
| | GTGGCGTGGTTTAGGTATTGGTTTGGCTTACGCTATTTTCTTTTTGGGTGTTTACTTG |
| | GCTGTCACCGAATTGAATGAATCTGCTAAACAAAGGGGTGAGATCTTGGTTTTTCCA |
| | CAAGCTGTTATGAGAAGGATGAAGAAGCAAAGAAAGTTAAGAGCTGGTACAAACG |
| | CTAACGGTTCCGATATTGAAAACACTGCTGGTGTTGCTACATTGAACGAAAAGAAG |
| | ATGCTGGAAGAGTCCTCTAATTCTGTTGCTTCATCTTCTTCTATGGGTGACGTTAAGT |
| | TGTCATCTTCTGAAGCTACTTTCCACTGGAAGAACGTTTGTTTTGAAGTCCCAATCAA |
| | GAAAGAAACCAGAAGGATCTTGGATAACGTAGATGGTTGGGTAAAACCAGGTACT |
| | TTGACTGCTTTGATGGGTGCTTCTGGTGCTGGTAAAACTACTTTATTGGACTGTTTG |
| | GCCTCTAGAGTTACTACTGGTACTATTACTGGTGACATGTTCATCAACGGTTTCTTGA |
| | GAGATGCTTCTTTCGCTAGATCTATTGGTTACTGTCAACAACAAGACTTGCACTTGC |
| | AAACTGCTACTGTTAGAGAATCTTTGAGATTCTCCGCTTACTTGAGACAACCATCTTC |
| | TGTTTCTAAGTCCGAGAAAGAAAAGTATGTTGAGGACGTGATTAAGATCTTGGAGA |
| | TGGAAACTTATGCTGATGCAGTTGTTGGTGTTGCCGGTGAAGGTTTGAATGTTGAA |
| | CAAAGAAAAAGGTTGACCATCGGTGTTGAATTGGCTGCTAAACCTAAGTTGCTGTT |
| | GTTTTTGGATGAACCTACATCTGGTTTGGACTCTCAAACTGCTTGGTCTATTTGTCAG |
| | TTGATGAGAAAGTTGGCTAACCATGGTCAAGCTATTTTGTGCACTATTCATCAACCA |
| | TCCGCTTTGTTGATGCAAGAATTTGATAGGTTGCTGTTCTTGCAAAGAGGTGGTAAG |
| | ACTGTTTACTTTGGTGACTTAGGTAAGGGTTGCCAAACCATGATTGATTACTTTGAA |
| | AAGAACGGTGCTCATCCATGTCCTGCTGGTGCTAATCCTGCTGAATGGATGTTGGA |
| | AGTTATAGGTGCTGCTCCAGGTTCTCATGCTAATCAAAATTACTCTGAAGTCTGGCG |
| | TAACTCCTCTGAGTACAAAGCTGTTCAAGAGGAATTGGAGTGGATGGAAAAAGAAT |
| | TGCCAAAAAGACCATTCGACAACTCCTCAGAACAAACTGAATTTGCTACCTCTTTGG |
| | TTTACCAGTACACTTTGGTTACCAAGAGATTGGTCGAACAATATTGGAGAACACCAT |
| | CTTACTTGTGGTCTAAGATTGGTTTGACCATCATCTCCCAAATCTTCATCGGTTTCAC |
| | TTTCTTCAAGGCCGATAATTCCATGCAAGGCTTGCAAAATCAAATGCTGTCCATCTTC |
| | ATGTTCTCCGTTATTTTCAATCCAACCTTGCAACAGTACTTGCCAACTTTTGTTGCTCA |
| | AAGAGACTTGTACGAAGCTAGAGAAAGACCATCTAGAACTTTTTCTTGGGTCGCTTT |
| | CATCTTGTCCCAAATTACTGTTGAAATCCCCTGGAACATTATTGCAGGTACTATAGG |
| | TTTCTTGGTCTACTATTATCCAGTCGGCTTGTATTCTACTGCTTCTAAAGCTGGTCAA |
| | TTGCACGAAAGAGGTGCTTTATTTTGGTTGTACGCTACAGCTTACTACGTTTTCACT |
| | GGTTCAATGGCTCAATTGTGTATTGCTGGTCAAGAAGTTGCTGAACCAGCAGGTCA |
| | AATGGCTAGTTTGTTGTTCACTCTGTCTTTGTCTTTCTGCGGTGTTTTGGTTGGTCCA |
| | TCATCAATGCCAGGTTTTTGGAAGTTTATGTACAGAGTCTCTCCATTGACCTACTTCG |
| | TTGATGGTACTTTGTCTACTGGTATTGCTAACGGTAAAGTTCAATGCTCCGATTACG |
| | AGTTGGTTAAGTTTAAACCAGCTAATGGTATGACCTGTGGTGAGTATATGGAACCTT |
| | ACATTAAGTTGGTTGGTACGGGTTATTTGTCTGATCCATCTGCTACTGATGAATGCA |
| | GATTTTGTTCCGTTTCTACCACCAACGATTACTTGTCAGCTGTTTCTTCATCATACTCT |
| | AGAAGGTGGCGTAATTATGGTATCTTCCTAGTGTACATTTTCTTCAACTTCGCTATG |
| | GCCGTTTTCATATATTGGTTGGCTAGAGTTCCTAAGAAGAGAAATAGAGTTGCTGAT |
| | GAACGTAAGACCGAAGCTCAAAAGTTAGTCGAAAAGTAA |
| SEQ ID | MVDNVAPNGASYQNNNIGNEMAADDISEQASSPGVYRGFESGAQQSVRNLARSLTN |
| NO: 988 | RSGDAVSMAADWNTINPVFSTVESPSYDPRLDPNSDEFSSSLWVQNLSQLVSSNPDHY |
| | KPYSLGCSWRNLRAYGNSTDVAYQSTVVNLPLQLVEYVYRAARKARPEDTFDILKPMD |
| | GMVKPGELLVVLGRPGSGCSTLLKSISSNTHGFHIDKESEISYDGLSPKEISRHYRGEVVY |
| | NAEADVHFPHLSVFDTLKTVARLACPTNRIQGVDRETFATHITEVAMATYGLSHTRNTK |
| | VGNELVRGVSGGERKRVSIAEVSICGSKFQCWDNATRGLDSATALEFIRALRTQAKMTR |
| | SSAVIAIYQCSQDAYDLFDKVSVLHEGYQIYFGRAKEAKQYFQDMGYVCPDRQTTADFL |
| | TAVTNPAERILNEDMVKAGKKIPLTAAEMEAHWKQSEAYKGLLQEIDYYSTHDQANN |
| | RQQLKEAHVAKQSKKARAQSPYTVSYGLQVKYLLIRNMQRIRNNMGITLFQVIGNGG |
| | MSFILGSMFYKALKHDDTAGFYSRAGALFFAVLFNAFSCMLEILALYEARPISEKHKRYSL |
| | YHPSADAMASVISEIPAKLLTSLTFNLAMYFLCNFKREAGAFFFYFLMTMVGTFAMSHIF |
| | RCLGASTKTYAESMVPASLLLLALAIYTGFAIPKTKILGWAKWIWYINPLSYIFESLMVNE |
| | FHGRQFKCSQFVPAGPGYENVSGTQRVCSAVGALPGEDYVSGERYINVAYNYYHSHK |
| | WRGLGIGLAYAIFFLGVYLAVTELNESAKQRGEILVFPQAVMRRMKKQRKLRAGTNAN |
| | GSDIENTAGVATLNEKKMLEESSNSVASSSSMGDVKLSSSEATFHWKNVCFEVPIKKET |
| | RRILDNVDGWVKPGTLTALMGASGAGKTTLLDCLASRVTTGTITGDMFINGFLRDASF |
| | ARSIGYCQQQDLHLQTATVRESLRFSAYLRQPSSVSKSEKEKYVEDVIKILEMETYADAV |
| | VGVAGEGLNVEQRKRLTIGVELAAKPKLLLFLDEPTSGLDSQTAWSICQLMRKLANHG |
| | QAILCTIHQPSALLMQEFDRLLFLQRGGKTVYFGDLGKGCQTMIDYFEKNGAHPCPAG |
| | ANPAEWMLEVIGAAPGSHANQNYSEVWRNSSEYKAVQEELEWMEKELPKRPFDNSS |
| | EQTEFATSLVYQYTLVTKRLVEQYWRTPSYLWSKIGLTIISQIFIGFTFFKADNSMQGLQN |
| | QMLSIFMFSVIFNPTLQQYLPTFVAQRDLYEARERPSRTFSWVAFILSQITVEIPWNIIAG |
| | TIGFLVYYYPVGLYSTASKAGQLHERGALFWLYATAYYVFTGSMAQLCIAGQEVAEPAG |
| | QMASLLFTLSLSFCGVLVGPSSMPGFWKFMYRVSPLTYFVDGTLSTGIANGKVQCSDYE |
| | LVKFKPANGMTCGEYMEPYIKLVGTGYLSDPSATDECRFCSVSTTNDYLSAVSSSYSRR |
| | WRNYGIFLVYIFFNFAMAVFIYWLARVPKKRNRVADERKTEAQKLVEK |
| SEQ ID | ATGTCCTTGGGTACTACCCATTTGCCAGAAGCTTTGGCTGCTAATCATGAAGCTGCT |
| NO: 989 | GCTGCTACTTCTAACAATTCTGAACCAGATTCTTTCCATCCAGAGTACAGAGGTTTTG |
| | AAGATCAAGCTCAAGATCACGTTAGAAACTTGGCTAGAACTTTGACTAATGCTTCTG |
| | CTCCAGGTTCTGTTGCTTCTATGTCTCCAATCAATCCAGTTTTCTCTACTCCAGATGCT |
| | CCACATTATGATGCTAGATTGGATCCTAACTCCGACGAATTTTCTTCTGCTTTTTGGG |
| | TTCACAACGTGTCTCAATTGGTTGCTAGAGATCCAGATCATTACAAGCCATATTCTTT |
| | GGGTTGTTCTTGGAGAAACTTGAGAGCTTATGGTAACGCTACTGATGTTGCTTACCA |
| | ATCTACTGTTGCTAACTTGCCATTGCAATTGGCTGAAACTGTTTTGAGAATGGCTAG |
| | AAAAGCTAGACCAGAAGATACCTTCGATATCTTGAAACCTATGGATGGTTTGGTTA |
| | AGCCAAGAGAGTTGTTGGTTGTTTTGGGTAGACCAGGTTCAGGTTGTTCTACTTTGT |
| | TGAAAACTGTTTCCGCTAACACCCATGGTTTTCATGTTGATCCAAAGTCTCAAATCTC |
| | CTACGATGGTTTGACTCCAAAAGATGTTGCTAGACATTACAGAGGTGAAGTTGTTTA |
| | CAACGCCGAATCTGATGTTCATTTCCCACATTTGACTGTTTTCGACACCTTGAAAACA |
| | GTTGCCAGATTGTCTTGTCCATCCAACAGAATTCATGGTGTTGATAGAGAAACCTTC |
| | TCTACCCATATTACCGAAGTTGCTATGGCTACTTATGGTTTGTCTCATACCAGAAACA |
| | CTAAGGTCGGTAACGAATTGGTTAGAGGTGTTTCAGGTGGTGAAAGAAAGAGAGT |
| | TTCTATTGCCGAAGTCTCTATTTGCGGTTCTAAGTTTCAATGTTGGGATAATGCTACC |
| | AGAGGTTTGGATTCTGCTACTGCTTTGGAATTCATTAGAGCTTTGAGAACCGAAGCT |
| | AAGTTGACTCATTCTGCTGCTGTTATTGCTATCTACCAATGTTCTCAAGATGCCTACG |
| | ATTTGTTCGATAAGGTTTCTGTTTTACACGAGGGTTATCAGATCTATTTCGGTCCAGC |
| | TAATCAAGCCAAGCAATACTTTGAAACTATGGGTTACGTTTGCCCATCTAGACAAAC |
| | TACTGCTGATTTCTTGACTGCTGTTACTAATCCAGCTGAAAGAATTGTCAGAGAAGG |
| | ATGTAGACCACCAGCTACTGCTGTTGAAATGGAAAAGTATTGGAAACAGTCCCCAG |
| | ATTACAAAAGGTTGTTGGGTGAAATTGATGAATACGCTGCTCATGAACAAGCCGAT |
| | AACATGAGAAATTTGGCCGAAAATCATGTTGCTAAGCAATCAAGAAGGGCTAGACC |
| | AAAATCTCCATACACTGTTTCTTACGGCTTGCAGGTTAAGTACTTGTTGATCAGAAA |
| | CATGCAGAGGATCAGATCCAATATGGGTGTCACTGTTTTCCAAGTTATTGGTAATGG |
| | TTCCATGGCCTTTATCTTGGGTTCTATGTTTTACAAGGTCTTGAAGCACGATACCACC |
| | GAAGGTTTTTATTCTAGAGCTGGTGCTTTGTTCTTCGCCGTTTTGTTTAATGCTTTCTC |
| | CTGCTTGTTGGAAATCTTCGCATTATATGAAGCCAGACCAGTTTCTGAAAAGCACAA |
| | GAGATACAGCTTGTATCATCCATCTGCTGATGCTATGGCATCCGTTATTTCTGAAGTT |
| | CCAGCTAAGTTATTGACCTCCGTTTCTTTTAACTTGGCCTTGTACTTCTTGTGCAACTT |
| | TAAAAGAGAAGCTGGCGCCTTTTTCTTCTACTTCTTGATGACTATGGTTGCCACGTTT |
| | TTGATGTCCCATATTTTCAGATGTTTGGGTGCTTCTACTAAGACCTATGCTGAATCTA |
| | TGGTTCCAGCTTCAGTTTTGTTGTTGGCTTTGTCTATCTACACCGGTTTTGCTATTCCA |
| | AAGACCAAGATTTTAGGTTGGTCTAAGTGGATCTGGTACATCAATCCATTGTCCTAC |
| | GTTTTCGAATCCTTGATGGTTAACGAATTCCACGATAGAAGATTCGATTGCTCTGCT |
| | TATATTCCAACTGGTCCAGCTTACGAATCTATCTCTGGTACTGAAAGAGTTTGTTCTG |
| | CTGTTGGTGCTGTTCCAGGTCAAGATTATGTTAATGGTGAAACCTACATCAACGTTG |
| | CCTATGGTTATTACCATTCTCATAAGTGGCGTGGTTTAGGTATTGGTTTGGCTTATG |
| | CTATAGTTTTCTTGGGTGTTTACTTGGCCGTTACCGAATTCAATGAATCCGCTAAACA |
| | AAGGGGCGAGATTTTAGTTTTTCCACAAGCTATCATGAGGCGTATGAAGAAGCAAA |
| | GACATAGGTCCGAAAAGAACAATGGTGGTGGTGCTAGAGGTTCTGAAACTACTGG |
| | TGGTGGCGGAGGTGGTGGTTCTGCTGCAGATTTGGAATCTTCTGCTGGTGTTGTTC |
| | CTGTTAACGAAAAGAAGCTATTGGAAGATTCTACCGATTCTGCCAATTCTACCAACT |
| | CTTCTATGGGTGAAGCTGGTTTAACTCAATCTGAAGCTATCTATCATTGGAGGAACG |
| | TTTGTTTCGATGTCCCCATTAAGAAAGAAACCAGAAGAATCTTGGATCACGTTGATG |
| | GTTGGGTAAAACCAGGTACTTTGACTGCTTTGATGGGTGCATCTGGTGCTGGTAAA |
| | ACTACTTTATTGGACTGTTTGGCTTCTAGAGTTACCACTGGTGTTATTACTGGTGACA |
| | TGTTCATTAACGGTTTCTTGAGAGATTCCTCATTCGCTAGATCTATTGGTTACTGTCA |
| | ACAACAAGACTTGCACTTGGAAACTTCTACCGTTAGAGAATCTTTGAGATTCTCCGC |
| | TTATTTGAGACAACCATCTCACATCTCTAAGCAAGAAAAGGATAGATACGTCGAAG |
| | AAGTCATCAGGATCTTGGAAATGTTGCCATACGCTGATGCTGTTGTTGGTGTTGCTG |
| | GTGAAGGTTTGAATGTTGAACAGAGAAAAAGATTGACCATCGGTGTTGAATTAGCT |
| | GCTAAACCTAAGCTGTTGCTGTTTTTGGATGAACCTACTTCCGGTTTAGATTCTCAAA |
| | CTGCTTGGTCTATTTGCCAGTTGATGAGAAAGTTAGCCAATCATGGTCAAGCTATTT |
| | TGTGCACCATTCATCAACCATCAGCTTTGTTGATGCAAGAATTCGATAGGTTGCTAT |
| | TCTTGCAAAGAGGTGGTAAGACTGTTTACTTTGGTGACTTAGGTCCAGGTTGCCAA |
| | ACTATGATTGATTACTTTGAATCTCATGGTGCCCATAAGTGTCCAGATGGTGCTAAT |
| | CCTGCAGAATGGATGTTGGAAGTTATAGGTGCTGCTCCTGGTACTCATGCTTCTCAA |
| | AATTATCATGACGTTTGGAGGAATTCCGATGAATATCGTGCTGTTCAAGAGGAATT |
| | GGAATGGATGGAACGTGAATTGCCAAAGAAGCCAATTGATACCTCTAACGAACAGT |
| | CTGAATTCTCGACTTCTTTGTTCTACCAATACTGTTTGGTCACCAAGCGTTTGTTGGA |
| | ACAATATTGGAGAACTCCATCTTACCTGTGGTCTAAAATTGGTTTGACCATCATCTCC |
| | CAAATCTTCATCGGTTTCACTTTCTTCAAGGCCGATTCTTCTATGCAAGGCTTGCAAA |
| | ATCAAATGCTGTCCATCTTCATGTTCACCGTTATTTTCAATCCAACCTTGCAACAATA |
| | CCTGCCAACTTTTGTTTCTCAGAGAGACTTGTACGAAGCTAGAGAAAGACCATCTAG |
| | AACATTTTCTTGGCTGGCCTTCATTTTGTCCCAGATTTCAGTTGAAATCCCCTGGAAT |
| | ATTTTGGCTGGTACTGTTGGTTTCTTCGTCTACTACTTTCCAGTCGGTTTTTACAACA |
| | ATGCTTCCTTCGCTGATCAATTGCACGAAAGAGGTGCTTTATTTTGGTTGTACGCTA |
| | CCGCTTTTTACGTTTTCACTGGTTCTATGGCCCAATTGGTTATTGCATCTCAAGAAGT |
| | TGCTCAATCCGCTGGTCAAATTTCCTCTTTGTTGTTCACTATGTGCTTGTCTTTCTGCG |
| | GTGTTATGGTTCAACCTAACAATATGCCTAGATTCTGGATTTTCATGTACCGTGTTTC |
| | TCCATTGACCTACTTCATAGATGGTACATTGTCTACCGGTTTGGCAAATGCAGATGT |
| | TCACTGTTCTGATTACGAGATGGTTAGTTTTACTCCACCACAAGGTCAAACTTGTGG |
| | TCAGTATATGCAATCCTACATTTCTTCAGCTGGTACAGGTTATTTGGCTGATCCAGAT |
| | GCAACTGATGAATGTAGATTCTGTTCTGTCTCCTCTACCAACGATTACTTGAAAGCA |
| | GTTTCTTCCGAGTATACACATAGATGGCGTAACTACGGTATCTTCCTAGCTTTCATTA |
| | TGTTCAATTTTGCTGCCGCCGTCTTTTTCTACTGGTTGGCTAGAGTTCCTAAGAAGA |
| | GAAATAGAGTTGCTGACGAAAGAAAACCCGAAGCTCAAAAGATTCAAGAGAAGTA |
| | A |
| SEQ ID | MSLGTTHLPEALAANHEAAAATSNNSEPDSFHPEYRGFEDQAQDHVRNLARTLTNAS |
| NO: 990 | APGSVASMSPINPVFSTPDAPHYDARLDPNSDEFSSAFWVHNVSQLVARDPDHYKPYS |
| | LGCSWRNLRAYGNATDVAYQSTVANLPLQLAETVLRMARKARPEDTFDILKPMDGLV |
| | KPRELLVVLGRPGSGCSTLLKTVSANTHGFHVDPKSQISYDGLTPKDVARHYRGEVVYN |
| | AESDVHFPHLTVFDTLKTVARLSCPSNRIHGVDRETFSTHITEVAMATYGLSHTRNTKVG |
| | NELVRGVSGGERKRVSIAEVSICGSKFQCWDNATRGLDSATALEFIRALRTEAKLTHSAA |
| | VIAIYQCSQDAYDLFDKVSVLHEGYQIYFGPANQAKQYFETMGYVCPSRQTTADFLTAV |
| | TNPAERIVREGCRPPATAVEMEKYWKQSPDYKRLLGEIDEYAAHEQADNMRNLAENH |
| | VAKQSRRARPKSPYTVSYGLQVKYLLIRNMQRIRSNMGVTVFQVIGNGSMAFILGSMF |
| | YKVLKHDTTEGFYSRAGALFFAVLFNAFSCLLEIFALYEARPVSEKHKRYSLYHPSADAMA |
| | SVISEVPAKLLTSVSFNLALYFLCNFKREAGAFFFYFLMTMVATFLMSHIFRCLGASTKTY |
| | AESMVPASVLLLALSIYTGFAIPKTKILGWSKWIWYINPLSYVFESLMVNEFHDRRFDCS |
| | AYIPTGPAYESISGTERVCSAVGAVPGQDYVNGETYINVAYGYYHSHKWRGLGIGLAYA |
| | IVFLGVYLAVTEFNESAKQRGEILVFPQAIMRRMKKQRHRSEKNNGGGARGSETTGGG |
| | GGGGSAADLESSAGVVPVNEKKLLEDSTDSANSTNSSMGEAGLTQSEAIYHWRNVCF |
| | DVPIKKETRRILDHVDGWVKPGTLTALMGASGAGKTTLLDCLASRVTTGVITGDMFING |
| | FLRDSSFARSIGYCQQQDLHLETSTVRESLRFSAYLRQPSHISKQEKDRYVEEVIRILEMLP |
| | YADAVVGVAGEGLNVEQRKRLTIGVELAAKPKLLLFLDEPTSGLDSQTAWSICQLMRKL |
| | ANHGQAILCTIHQPSALLMQEFDRLLFLQRGGKTVYFGDLGPGCQTMIDYFESHGAHK |
| | CPDGANPAEWMLEVIGAAPGTHASQNYHDVWRNSDEYRAVQEELEWMERELPKKPI |
| | DTSNEQSEFSTSLFYQYCLVTKRLLEQYWRTPSYLWSKIGLTIISQIFIGFTFFKADSSMQG |
| | LQNQMLSIFMFTVIFNPTLQQYLPTFVSQRDLYEARERPSRTFSWLAFILSQISVEIPWNI |
| | LAGTVGFFVYYFPVGFYNNASFADQLHERGALFWLYATAFYVFTGSMAQLVIASQEVA |
| | QSAGQISSLLFTMCLSFCGVMVQPNNMPRFWIFMYRVSPLTYFIDGTLSTGLANADVH |
| | CSDYEMVSFTPPQGQTCGQYMQSYISSAGTGYLADPDATDECRFCSVSSTNDYLKAVS |
| | SEYTHRWRNYGIFLAFIMFNFAAAVFFYWLARVPKKRNRVADERKPEAQKIQEK |
| SEQ ID | ATGTCCGACAACTCCGAAGTCGAATCTTTCAATGCTAAACATGTTGAAGCT |
| NO: 991 | TCCGGTGGTACTAAGGATCCATATACTGGTGTTCCAGATACCAACTCTGT |
| | TCAATCTTTGGCTAGAACTTTCACCCATATGTCTTTGGCTTCATCCTCTAA |
| | CGATAACGAAATCTATGGTGTTCCTGTTGATGGTCCAGAAGGTGTTGAAT |
| | CTTATAACGCTAAGATCGACCCAAACTCTGAAGAATTTGATGCTCATGCTT |
| | GGATGAGAAACTTGAACAGATTGAGATCTGCTGATCCAGACTACTACAAG |
| | AACATCTCTTTAGGTATGGCTTACAAGAACTTGTCTGCTTTCGGTGATTCT |
| | TCCGATGTTGTTTATCAACCTACCGTCTTGAACGTGTTCCAAAAATCCATT |
| | GAGGACATCTACAGAAAGGTTAGAAAAGCTAGACCATCCGATAAGTTCAC |
| | CATTTTGAAACCTATGGACGGTATTTTGAAGCCAGGTTCTTTGAATGTTGT |
| | TTTGGGTAAACCAGGTTCTGGTTGTTCTACTTTGTTGAAAACCTTGTCCTC |
| | TTCTACCTTCGGTTTCGAAGTTACCAAGGATTCCGTTATTTCCTACGATGG |
| | TATTACCCCAAAAGAGATCGAAAACAACTACAGAGGTGATGTTGTATACC |
| | AAGGTGAAGTTGATATTCACTTCCCACATTTGACTGTGTTCGAAACCTTGA |
| | ACAATGTTGCTTTGTTGACTACTCCAAAGAACAGGATTAAGGGTTTGTCCA |
| | GAGAAGAATTCTCCAAACATATGGCTGAAGCTACTATGGCTATGTATGGT |
| | TTGTCTCATACCAAGAACACTAAGGTCGGTAACGAATTGGTTAGAGGTGT |
| | TTCTGGTGGTGAAAGAAAAAGAGTTTCCATCTGCGAAATCTCATTGGTCA |
| | ATGGTAAGATCGTTTGCTACGATAACTCTACCAGAGGTTTGGATTCTGCTT |
| | CTACATTGTCCTTCATCAAGTCCTTGAAAACCCAATCTAAAGCTTCTGATA |
| | CCACTTCCGTTGTTGCTATCTATCAATGTTCTCAAGATGCCTACGATTTGT |
| | TCGATAACGTCATCGTTTTGGATGAAGGTTACCAGTTGTATAACGGTCCAT |
| | CTAACAAAGCCAAGGACTACTTTATTAAGATGGGTTACGTTTGCCCAGAA |
| | AGACAAACTACTGCTGATTTCTTGACTGCTGTTACTTCTCCAACTGAAAGA |
| | ATCAAGAATACCGAGATGATGGAAAAGGGTATCAAGATTCCAGAAACCTC |
| | CTTGGAAATGTACGAATACTGGAATGCTTCCGAAGAATGCCAAGAATTGA |
| | AGTCCGAAATCGACTACTACTTGTCCCATATCGATTCCTCATTGAAGGATC |
| | AATTCCATCAAGCTCATACTGCTTCTCAAGCTAAAAGAGCTAGACCTTCTT |
| | CTTCTTACTTGTTGACCTTTCAATTGCAGGTCAAGTATTTGTTGCAGAGAA |
| | ACTTCACTAGGATCAAGAAGGATATCGGCTTGTCTATGTTTCAAGTCTTGG |
| | GTAATTCTTTCATGGCCTTGATTATTGCCTCCATGTTCTACAAGGTTATGT |
| | ACTACACTAACACCTCCACGTTCTTCTATAGAGGTGGTACTTTGTTTTACG |
| | CCGTCTTGTTTAACTCCTTCTCCTCCTTGTTGGAAATCATGACATTATACG |
| | AAGCCAGGCCAATTATCGAGAAGCAAAAGAATTTGGCAATGTACCATCCA |
| | TCTGCTGAAGCCGTTTCTTCTATTTTGTCTGAAATGCCAGCCAAGATTATT |
| | ACCGCTATTGCCTTCAATATGTTCTACTACTGGATGACCAATTTGAAGAGA |
| | GATGCTGGCGCTTTCTTTTTCTACTTGCTGATGAATTTCGTTTGCCTGTTG |
| | GCTATGTCTCACATCTTTAGATTCATTGGTTCTGCCACTAAGTCTTTTCCA |
| | GGTGCTATGGTTCCAGCTTCTGTTATTTTGTTGGGTATTTCTATGTACGCC |
| | GGTTTCGCTATTCCAAAGACTTCTATGTTAGGTTGGTCTAAGTGGATCTAC |
| | TGGATTAACCCAATTCAATACGGTTTCGAGTCCTTGATGATCAACGAATTT |
| | CATGGTGTCGAATACCCATGCTCATCTTATATTCCATCTGGTACTGGTTAC |
| | TCCGATTTTGATTCAGCTTACAAAACCTGCTCTGTTGTTGGTGCTGTTCCA |
| | GGTTCAGATATTGTCTCTGGTGATTTGTTCCTGAAGTTGTCTTATGGTTAC |
| | GAACATTCTCATAAGTGGCGTGGTTTTGGTGTTGTTTTAGCTTACGCTATT |
| | TTCTTCTTCGGTGTCTACTTGACTTTCACCGAGTATAATGAATCCGCTAAG |
| | CAAAAGGGTGAGATCATTGTCTTTCCACAAGCTGTTGTTCGTAAGATCAA |
| | GAAGATGTCTAAGTCTACCCACGATTTGGAATCAGCTTCAGCATCTGATG |
| | AATCTTACACCGACAAAAAGTTGGTTTCCGATGATTACGATGAATCCCAAG |
| | ATTCCTACAACGATGTTGGTTTGAGTGAATCCGAAGCTACTTTACATTGGA |
| | GAGATTTGTGTTACGACGTCCAAATCAAAGGTGAAACTAGAAGGATCTTG |
| | AACAACGTAGATGGTTGGGTTGCTAAGAACTCTATTACTGCTTTGATGGG |
| | TTCTTCTGGTGCTGGTAAAACTACTTTGATGGATTGCTTGGCTTCTAGAGT |
| | TACCATGGGTGTTATTACCGGTGATATTTTGGTTAACGGTAGATTGAGAG |
| | ATGAGGGTTTCCCAAGATCTATTGGTTACTGTCAACAACAAGACTTGCATT |
| | TGGCTACTGCTACTGTTAGAGAATCCTTGAAATTCTCCGCTTACTTGAGAC |
| | AACCAGCCTCTGTTTCTAAAGAAGAGAAAGACGCTTACGTCGAATCCGTC |
| | ATTAAGATCTTGGATATGCAAAGATACGCTGATGCTGTTGTAGGTGTAATG |
| | GGTGAAGGTTTGAACGTTGAACAAAGAAAACGTTTGACCATCGGTGTAGA |
| | ATTGGCTGCTAAACCTAAGCTGTTGATGTTCTTAGATGAACCTACTTCTGG |
| | TTTGGACTCTCAAACTGCTTGGTCTATTTGTCAGTTGATGAGAAAGTTGGC |
| | TAACCATGGTCAAGCTATTTTGTGCACTATTCATCAACCATCCGCCATGTT |
| | GATTGATCAGTTTGATAGGTTGCTGTTCTTGCAGAAAGGTGGTAAGACTG |
| | CTTATTTTGGTGACTTAGGTGAGGGTTGTAAGACCATGATTGATTACTTTG |
| | AATCTAAGGGTGCTCCAAAGTGTCCACCAAATGCTAATCCAGCTGAATGG |
| | ATGTTGGATATTGTCCAAGCTAGAGATTATCATGAAGCCTGGAAATCTTCA |
| | GACGAGTACAAACAAGTTCATGCTACTTTGGACGAAATGGAAAGAGAATT |
| | GCCAAACATCGTTATCTCCAACGCTGATGATACTTCTGCTTTTGCTGCTTC |
| | ATTTCCAGTCCAACTGTTTTACGTTTACAAGAGAGTCGTCCAACAATATTG |
| | GAGAACTCCAATCTATTTGTGGGCCAAGTTTTTCGTTACTGGTGCTTCTGA |
| | GTTGTTCATCGGTTTTACTTTCTTTAAGGCCAACCACACATTGCAGGGTTT |
| | GAAGAATCAAATGTTGGCCATCTTCATGTTCGTCGTCATTTTTAACCCATT |
| | CTTGCAACAGTACTTGCCAATCTTTACTCAACAGAGAGACTTGTACGAAG |
| | CTAGGGAAAGACCATCTAGAACATTTTCTTGGTACGCTTTCTTGATCGGTC |
| | AAATGTTAGCTGAAATCTTCCCAAACATTTTGTGTGCCATCTTGGGCTTTT |
| | TCTGTTTTTACTACCCAATTGGTTTCGCCTCTAACGCTTCTTATTCTGGTC |
| | AATTGGTTGAGAAGTCTGGCCTGTTTTTCTTCTACTCCTTGATTTTCTTCA |
| | CCTGGATTGGTTCTACAGCATTGATGGTTGCAGCTCCATTTGAAGATCCT |
| | CAAGCTGGTGGTCATTTGGCCAATTTGATGTTTACAATGGCCTTGTCTTTC |
| | AACGGTGTTTTTGTTGGTCCAGGTAAATTGCCAGGTTTTTGGAAGTTTATG |
| | TACCGTGTTTCTCCATTGACCTACTTCGTTGATGGTGCTTTGTCTATAGGT |
| | TTGTCCGATAACAAGGTTGAATGCTCTCAATACGAGTACACTGATGTTCAA |
| | TTGCCAGCTGGTATGACTTGTGGTGAATATTTGTCTCCTTACATCGAGAA |
| | GGTTGGTACAGGTTACATTTTGGATAAGAACGCTACCTCTGAATGCAAGA |
| | TGTGTCAAATTTCTACTACCAACGCCTTCTTGACCACTGTTTCATCTAAAT |
| | ATTCTAGGCGTTGGCGTAACCTGGGTATTTTCATTGCTTACATTGCTTTCA |
| | ACTACGTGATGGCCATGTTCTTATATTGGTGGGCTAGAGTTCCAAAGAAG |
| | GCTAACAGAGTTTCTGACGAAAAAGACTCTTCCAAGGATAAGAAGGACGA |
| | GAAGAAGTAG |
| SEQ ID | MSDNSEVESFNAKHVEASGGTKDPYTGVPDTNSVQSLARTFTHMSLASSSN |
| NO: 992 | DNEIYGVPVDGPEGVESYNAKIDPNSEEFDAHAWMRNLNRLRSADPDYYKNI |
| | SLGMAYKNLSAFGDSSDVVYQPTVLNVFQKSIEDIYRKVRKARPSDKFTILKP |
| | MDGILKPGSLNVVLGKPGSGCSTLLKTLSSSTFGFEVTKDSVISYDGITPKEIE |
| | NNYRGDVVYQGEVDIHFPHLTVFETLNNVALLTTPKNRIKGLSREEFSKHMA |
| | EATMAMYGLSHTKNTKVGNELVRGVSGGERKRVSICEISLVNGKIVCYDNST |
| | RGLDSASTLSFIKSLKTQSKASDTTSVVAIYQCSQDAYDLFDNVIVLDEGYQL |
| | YNGPSNKAKDYFIKMGYVCPERQTTADFLTAVTSPTERIKNTEMMEKGIKIPE |
| | TSLEMYEYWNASEECQELKSEIDYYLSHIDSSLKDQFHQAHTASQAKRARPS |
| | SSYLLTFQLQVKYLLQRNFTRIKNDIGLSMFQVLGNSFMALIIASMFYKVMYYT |
| | NTSTFFYRGGTLFYAVLFNSFSSLLEIMTLYEARPIIEKQKNLAMYHPSAEAVS |
| | SILSEMPAKIITAIAFNMFYYWMTNLKRDAGAFFFYLLMNFVCLLAMSHIFRFIG |
| | SATKSFPGAMVPASVILLGISMYAGFAIPKTSMLGWSKWIYWINPIQYGFESL |
| | MINEFHGVEYPCSSYIPSGTGYSDFDSAYKTCSVVGAVPGSDIVSGDLFLKLS |
| | YGYEHSHKWRGFGVVLAYAIFFFGVYLTFTEYNESAKQKGEIIVFPQAVVRKI |
| | KKMSKSTHDLESASASDESYTDKKLVSDDYDESQDSYNDVGLSESEATLHW |
| | RDLCYDVQIKGETRRILNNVDGWVAKNSITALMGSSGAGKTTLMDCLASRVT |
| | MGVITGDILVNGRLRDEGFPRSIGYCQQQDLHLATATVRESLKFSAYLRQPA |
| | SVSKEEKDAYVESVIKILDMQRYADAVVGVMGEGLNVEQRKRLTIGVELAAK |
| | PKLLMFLDEPTSGLDSQTAWSICQLMRKLANHGQAILCTIHQPSAMLIDQFDR |
| | LLFLQKGGKTAYFGDLGEGCKTMIDYFESKGAPKCPPNANPAEWMLDIVQA |
| | RDYHEAWKSSDEYKQVHATLDEMERELPNIVISNADDTSAFAASFPVQLFYV |
| | YKRVVQQYWRTPIYLWAKFFVTGASELFIGFTFFKANHTLQGLKNQMLAIFMF |
| | WVIFNPFLQQYLPIFTQQRDLYEARERPSRTFSWYAFLIGQMLAEIFPNILCAIL |
| | GFFCFYYPIGFASNASYSGQLVEKSGLFFFYSLIFFTWIGSTALMVAAPFEDP |
| | QAGGHLANLMFTMALSFNGVFVGPGKLPGFWKFMYRVSPLTYFVDGALSIG |
| | LSDNKVECSQYEYTDVQLPAGMTCGEYLSPYIEKVGTGYILDKNATSECKMC |
| | QISTTNAFLTTVSSKYSRRWRNLGIFIAYIAFNYVMAMFLYWWARVPKKANRV |
| | SDEKDSSKDKKDEKK- |
| SEQ ID | ATGTCTTTGGGTACTTCCCATGTTCCAGAAGCTTTGGCTGCTGAATTGGAAGCTGTT |
| NO: 993 | AGAAATAGGGATGAATCTTCTTCAACCGCCGAAAAGTATGAAGGTTTGGATTCTCA |
| | TGCTAAGGATTCCGTTAGAGATTTGGCTAGATCTTTGACTCATGAAGGTGCTGCTGC |
| | TGCAGATGGTTCTGAATCTCCAGTTAATCCAGTTTTCTCTGATCCAAATGCTCCAGAT |
| | TATGATGCTAGATTGGACCCAAATTCCGACGAATTTTCTTCTGCTTTTTGGGTCAGA |
| | AACTTGTCCGAATTGGTTAGACAAGATCCAGATCACTACAAGCCATATTCTTTGGGT |
| | TGTTCTTGGAGAAACTTGAGAGCTTATGGTAACGCTACTGATGTTGCTTACCAATCT |
| | ACCGTTGTTAACATCCCAGTTCAATTGGTTGAAACCGTTTACAGAATGGCTAGAAAA |
| | GCTAGACCAGAAGATACCTTCAACATCTTGAAACCTATGGATGGTTTGGTTAAGCCA |
| | AGAGAGTTGTTGGTTGTTTTGGGTAGACCAGGTTCTGGTTGTTCTACTTTGTTGAAA |
| | ACTGTTTCCGCTAACACCCATGGTTTTCATGTTGATCCAGAATCCAGAATTTCCTACG |
| | ATGGTTTGTCTCCAAAAGAAGTTGCCAAACATTACAGAGGTGAAGTTGTTTACAAC |
| | GCCGAATCTGATGTTCATTTCCCACATTTGACTGTTTTCCAGACCTTAAAGACTGTTG |
| | CAAGATTGGCTTGTCCATCCAATAGAATTCATGGTGTTGATAGAGAAGCCTTCTCCA |
| | CTCATATTACTGAAGTTGCTATGGCTACTTACGGTTTGTCACATACAAGAAACACTA |
| | AGGTCGGTAACGAATTGGTAAGAGGTGTTTCTGGTGGTGAAAGAAAGAGAGTTTC |
| | TATTGCCGAAGTTTCCATTTGCGGTTCTAAGTTTCAATGTTGGGATAATGCTACTAG |
| | AGGTTTGGACTCTGCTACTGCTTTGGAATTCATTAGAGCTTTGAGAACCCAAGCTAA |
| | GTTGACTGCTTCTGCTGCTGTTATTGCTATCTACCAATGTTCTCAAGATGCCTACGAT |
| | TTGTTCGATAAGGTTTCTGTTTTACACGAGGGTTACCAAATCTATTTTGGTCCAGCTA |
| | AAGATGCTAAGGCCTACTTTGAAAGAATGGGTTATGTTTGTGCTCCAAGACAAACT |
| | ACTGCTGATTTTGTTACTGCTGTTACCAATCCAGCTGAAAGACAAGTTAGAGCTGGT |
| | GCTAGACCACCAGCTTCAGCTGTTGATATGGAAACATATTGGAAGCAGTCTCCAGA |
| | ATATGCTCAACTGTTACAAGATATCGATGAATACGAAGCCTCTGGTGGTAACTCTAA |
| | AGAACAATTGGCTGCTAATCATGTCGCTAAGCAATCTAGAAGGGCTAGAGCTGCTT |
| | CTCCATATACTGCTTCATTTTGGTTGCAGGTCAAGTACCTGTTGATCAGAAACATGC |
| | AAAGAATCAGGTCCAATATGGGTGTCACTGCTTTTCAAGTTATTGGTAATGGTTCCA |
| | TGGCTTTCATCTTGGGTTCCATGTTTTACAAGATTCTGAAGCACGATAACACCGCTG |
| | GTTTTTATTCTAGAGCCGGTGCTTTGTTTTTCGCCGTTTTGTTTAATGCTTTCTCGTGC |
| | ATGTTGGAAATCTTGGCATTATATGAAGCCAGGCCAATTTCTGAAAAGCACAAGAG |
| | ATACAGCTTGTATCATCCAGCTGCTGATGCTATGGCATCTGTTATTAGTGAAATTCC |
| | AGCCAAGTTGGTTACCTCTGTTGCTTTTAACTTGGCCTTGTACTTCTTGTGTAACTTC |
| | AAAAGAGAAGCTGGCGCTTTCTTCTTCTACTTCTTGATGACTATGGTTGCCACGTTTT |
| | TGATGTCCCATATTTTCAGATGTTTGGGTGCTTCTACTAAGACCTATGCTGAATCTAT |
| | GGTTCCAGCATCTGTTTTGTTGTTGGGTTTAGCTATCTACACCGGTTTTGCTATTCCA |
| | AAGACCAAGATTTTAGGTTGGTCTAAGTGGATCTGGTACATCAATCCATTGTCCTAC |
| | GTTTTCGAATCCTTGATGGTTAACGAATTCCACGGTAGAAGATTTGCTTGCTATGCT |
| | TATATTCCAACTGGTCCAGGTTACTTGGATGTTACTGGTACTGAACATGTTTGTTCTG |
| | CAGTTGGTGCTGTTCCAGGTCAAAATTATGTTGATGGTGAAACCTACATCAACGTTG |
| | CTTATGGTTATTACCATGCTCATAAGTGGCGTGGTTTAGGTATTGGTTTGGCTTACG |
| | CTATCTTTTTCTTGGGTGTTTACTTGGCCGTTGTCGAATTCAATGAATCTGCTAAACA |
| | AAGGGGTGAGATCTTGGTTTTTCCACATTGGGCTATGGCAAGAATGAAGAAGCAAA |
| | GAAGATTGAGAGCTGCTGGTGCTGATCCTGCTGATGAAGAACATGGTGGTGCTTCA |
| | TCTGGTACTACTGAAAAGAAAATGTTGGAAGATTCCGCCGAAGATGATGATGCTTC |
| | CGCTGGTGCTTCTGCCGATGCTGGTTTGTTGTCATCTTCTAATGCTATCTTTCATTGG |
| | AGGAACGTTTGCTTCGATGTTGCCATTAAGAAAGAAACCAGAAGAATCTTGGATCA |
| | CGTTGATGGTTGGGTAAAACCAGGTACTTTAACTGCTTTGATGGGTGCATCTGGTG |
| | CTGGTAAAACTACTTTATTGGATTGCTTGGCCTCTAGAGTTACTACTGGTGTTATTAC |
| | TGGTGACATGTTCATCAACGGTTTCTTGAGAGATGCTTCTTTCGCTAGATCTATTGG |
| | TTACTGTCAACAACAAGACTTGCATTTGGAAACTGCCACTGTTAGAGAATCTTTGAG |
| | ATTCTCTGCTTACTTGAGACAACCAGATCACGTTTCCATTCAAGACAAGAACTCTTAC |
| | GTTGACGATGTCATTAGGATCTTGGAGATGGAAAAGTACGCTGATGCTGTTGTTGG |
| | TGTTGCTGGTGAAGGTTTAAACGTTGAACAAAGAAAAAGGTTGACCATCGGTGTTG |
| | AATTAGCTGCTAAACCTAAGCTGTTGCTGTTTTTGGATGAACCTACTTCCGGTTTAG |
| | ATTCACAAACTGCTTGGTCTATTTGCCAGTTGATGAGAAAGTTGGCAAATCATGGTC |
| | AAGCTATTTTGTGCACCATTCATCAACCATCAGCTTTGTTGATGCAAGAGTTTGATA |
| | GGTTGCTGTTCTTGCAAAGAGGTGGTAGAACTGTTTACTTCGGTGAATTAGGTGCT |
| | GGTTGTCAAACCATGATTGACTACTTCGAATCACATGGTTCACATAAGTGTCCATCA |
| | GGTGCTAATCCAGCAGAATGGATGTTAGAAGTTATCGGTGCTGCTCCTGGTACTCA |
| | TGCTGCTCAAGATTATAATGAAGTTTGGAGGAATTCCGATGAGTACAGAGCTGTTC |
| | AAGAGGAATTGGAATGGATGGAAAGAGAATTGCCTAATAGACCAGCCGTTGATAC |
| | TTCTTCTGAACAGTCTGAATTTTCCACCTCCTTGGTTTACCAATACTCTTTGGTTACTC |
| | ACAGGTTGTTGCAGCAATATTGGAGAACTCCATCTTACTTGTGGTCTAAGGTTGGTT |
| | TGACCATTATCTCCCAGTTGTTTATTGGTTTCACCTTCTTCAAGTCCGACTCTTCTATG |
| | CAAGGTCTGCAAAATCAAATGCTGTCCATTTTTATGTTCGCCGTCATTTTTAACCCAA |
| | CCTTGCAGCAGTACTTGCCAACATTTGTTTCTCAAAGAGACTTGTACGAAGCCAGAG |
| | AAAGACCATCTAGAACTTTTTCATGGGTTGCCTTCATCTTGTCCCAAATTACTGTTGA |
| | AATCCCCTGGAATATTTTCGCTGGTACAATTGGTTTCTTGGTCTACTATTACCCAGTC |
| | GGTTTTTACTCTAACGCTTCTTATGCTGGTCAATTGCACGAAAGAGGTGCTTTATTCT |
| | GGTTATACGCTACCGCTTTTTACGTTTTCACTGGTTCTATGGCCCAATTAGTTGTTGC |
| | CGGTCAAGAAGTCGCTCAAGCAGCAGGTCAAATTGCTTCTTTGTTGTTTACCCTGTC |
| | TTTGTCTTTCTGTGGTGTTATGGTTCAACCTTACAATATGCCAGGTTTCTGGATTTTC |
| | ATGTACAGAGTTAGTCCACTGACCTACTTTATCGATGGTGCATTGTCTACTGGTATT |
| | GCTAATGCTAAAGTTCATTGCGCCGATTACGAAATGGTTAGGTTTACTCCACCACAA |
| | GGTCAAACATGTGGTCAGTATATGCAACCATATATTACTGCTGCTGGCACTGGTTAC |
| | TTGAAAGATTCTGGTGCTACAGATGAATGCCAATTCTGTTCTGTTTCTACTACCAAC |
| | GATTACTTGAAGGCCGTTTCTTCATCTTATTCTCATAGATGGCGTAACTACGGTATTT |
| | TCTTGGCCTTCATTATGTTCAATTTTGCTGCTGCCGTTTTCTTTTACTGGTTGGCTAGA |
| | GTTCCAAAGAAGAGAAATAGAGTTGCTGACGAAAGAAAGTCCGATGCTCAAAAGT |
| | TGAAAGAGAAGTAA |
| SEQ ID | MSLGTSHVPEALAAELEAVRNRDESSSTAEKYEGLDSHAKDSVRDLARSLTHEGAAAAD |
| NO: 994 | GSESPVNPVFSDPNAPDYDARLDPNSDEFSSAFWVRNLSELVRQDPDHYKPYSLGCSW |
| | RNLRAYGNATDVAYQSTVVNIPVQLVETVYRMARKARPEDTFNILKPMDGLVKPRELL |
| | VVLGRPGSGCSTLLKTVSANTHGFHVDPESRISYDGLSPKEVAKHYRGEVVYNAESDVH |
| | FPHLTVFQTLKTVARLACPSNRIHGVDREAFSTHITEVAMATYGLSHTRNTKVGNELVR |
| | GVSGGERKRVSIAEVSICGSKFQCWDNATRGLDSATALEFIRALRTQAKLTASAAVIAIY |
| | QCSQDAYDLFDKVSVLHEGYQIYFGPAKDAKAYFERMGYVCAPRQTTADFVTAVTNPA |
| | ERQVRAGARPPASAVDMETYWKQSPEYAQLLQDIDEYEASGGNSKEQLAANHVAKQ |
| | SRRARAASPYTASFWLQVKYLLIRNMQRIRSNMGVTAFQVIGNGSMAFILGSMFYKILK |
| | HDNTAGFYSRAGALFFAVLFNAFSCMLEILALYEARPISEKHKRYSLYHPAADAMASVIS |
| | EIPAKLVTSVAFNLALYFLCNFKREAGAFFFYFLMTMVATFLMSHIFRCLGASTKTYAES |
| | MVPASVLLLGLAIYTGFAIPKTKILGWSKWIWYINPLSYVFESLMVNEFHGRRFACYAYI |
| | PTGPGYLDVTGTEHVCSAVGAVPGQNYVDGETYINVAYGYYHAHKWRGLGIGLAYAIF |
| | FLGVYLAVVEFNESAKQRGEILVFPHWAMARMKKQRRLRAAGADPADEEHGGASSG |
| | TTEKKMLEDSAEDDDASAGASADAGLLSSSNAIFHWRNVCFDVAIKKETRRILDHVDG |
| | WVKPGTLTALMGASGAGKTTLLDCLASRVTTGVITGDMFINGFLRDASFARSIGYCQQ |
| | QDLHLETATVRESLRFSAYLRQPDHVSIQDKNSYVDDVIRILEMEKYADAVVGVAGEGL |
| | NVEQRKRLTIGVELAAKPKLLLFLDEPTSGLDSQTAWSICQLMRKLANHGQAILCTIHQP |
| | SALLMQEFDRLLFLQRGGRTVYFGELGAGCQTMIDYFESHGSHKCPSGANPAEWMLE |
| | VIGAAPGTHAAQDYNEVWRNSDEYRAVQEELEWMERELPNRPAVDTSSEQSEFSTSL |
| | VYQYSLVTHRLLQQYWRTPSYLWSKVGLTIISQLFIGFTFFKSDSSMQGLQNQMLSIFM |
| | FAVIFNPTLQQYLPTFVSQRDLYEARERPSRTFSWVAFILSQITVEIPWNIFAGTIGFLVYY |
| | YPVGFYSNASYAGQLHERGALFWLYATAFYVFTGSMAQLVVAGQEVAQAAGQIASLLF |
| | TLSLSFCGVMVQPYNMPGFWIFMYRVSPLTYFIDGALSTGIANAKVHCADYEMVRFTP |
| | PQGQTCGQYMQPYITAAGTGYLKDSGATDECQFCSVSTTNDYLKAVSSSYSHRWRNY |
| | GIFLAFIMFNFAAAVFFYWLARVPKKRNRVADERKSDAQKLKEK |
| SEQ ID | ATGGGTTTGCCAGAAGAACCACAAGATAACTCTTCAGGTTCTTCAGATGT |
| NO: 995 | TCCAGTTTACAATGGTTTCGATGTTAAGGCCCAAGAAAAGGTTAGACAATT |
| | GGCTAGAACTTTGACCGAACAATCTGCTTCTGGTTCTATTGGTGCTGGTG |
| | GTCATACTGCTGATGATGGTGCTGTTGTTGAAAGAGGTGACGCTCAATCT |
| | TTGTTCTCTGTTAGATCTAGAGCTGGTGTTAACCCAGTTTTTGATGGTGAA |
| | TCTGATGCTCAATACGATGCTAGATTGGATCCTAAGTCTGACGAATTTGTT |
| | TCTGCCCAATGGATCAAGAACATGTCCAGATTGTCTCATGAAGATCCAGA |
| | TTACTTCAAGCCATACTCTTTGGATTGCTGTTGGAGAGATTTGTCTGCTTC |
| | AGGTGCTTCTGCTGATGTTGCTTATCAATCTACTTTTGTTAACGCCCCAAA |
| | GAAGTATTTGGGTCAAGCTTATAGAGCTATTACCCCAGCTAAAGAAGTCA |
| | ACAGATTCGAAATTTTGAAGCCAATGGACGGTTTGTTGAACCCAGGTGAA |
| | TTATTGGTTGTTTTGGGTAGACCAGGTTCTGGTTGTACTACTTTGTTGAAG |
| | TCCATTTCCTCTAACACCCATGGTTTCAAGATCTCCAAAGAATCCCATGTT |
| | TCCTACAAGGGTATTTCCCCAAGAGATATTAACAAGCACTTCAGAGGTGA |
| | AGTTGTTTACAACGCTGAAGCCGATATTCATTTGCCACATTTGACTGTTTA |
| | CCAGACCTTGTTGACTGTTGCCAGATTGAAAACTCCAGCTAATAGAGTTA |
| | AGGGTGTTTCTAGAGAAGCTTGGGCTCATCATATGACTGAAGTTGCTATG |
| | GCTACTTATGGTTTGTCTCATACCAGAAACACTAAGGTTGGTAACGATATT |
| | GTCAGAGGTGTTTCAGGTGGTGAAAGAAAGAGAGTTTCTATTGCTGAAGT |
| | CGCTATTTGCGGTTCTAAGTTTCAATGTTGGGATAACGCTACTAGAGGTTT |
| | GGATTCTGCTACTGCTTTGGAATTTGTTAGAGCCTTGAAAACCCAAGCTG |
| | ATATTGCTAATACTGCTGCTGCTGTTGCAATCTACCAATGTTCTCAAGATG |
| | CTTACGATTTGTTCGATAAGGTTTGCGTTTTGGATGGTGGTTACCAAATCT |
| | ATTTTGGTCCAGCTAAGGATGCTAAGAGGTACTTTCAAGAAATGGGTTAC |
| | GTTTGCCCAGATAGACAAACTACAGCTGATTTCTTGACTGCTGTTACTTCT |
| | CCAGCTGAAAGAATCGTCAATGAAGAGTTCATTAAGAAGGGTATCAGAGT |
| | CCCACAAACTCCAAAAGAAATGTCCGATTATTGGAGGAACTCTTCCGAGT |
| | ACAGAAAGTTGATTGCTCAAATTGATGCCAAGATGGCCGAAAACGATGAA |
| | GAAGAAAGAGTCAGGATCAAAGAATCTCATATCGCCTCTCAATCTAAGAG |
| | AGCTAGAGCTTCTTCTCCTTACATGGTTTCTTATATGATGCAGGTCAAGTA |
| | CCTGCTGATTAGAAACGTTTGGAGAATCAGAAACTCCTCCGCTATTGCTTT |
| | GTTCCAAGTTATTGGTAACTCCGTTATGGCCTTGATTTTGGGTTCTATGTT |
| | CTACCAAGTTATGAAGGGTGATTCTACTGCTACCTTCTACTTTAGAGGTTC |
| | TGCTATGTTCTTTGGCTTGTTGTTTAACGCCTTCTCATCCTTGTTGGAAAT |
| | CTTCTCATTATACGAAGCCAGACCAATTACCGAAAAGCACAGAACTTATTC |
| | CTTGTACCATCCTTCAGCTGATGCTTTTGCTTCTGTTTTGTCTGAAATCCC |
| | CACTAAGTTGATGACCGCTGTTTGTTTCAACATCATCTTCTACTTCATGGT |
| | CAACTTCAGAAGAAACGCTGGTAGATTCTTTTTCTACTTCCTGATTAACAT |
| | CGTTGCCACCTTCACTATGTCTCATTTGTTTAGATGTGTCGGCTCTTTGAC |
| | TAAGACTTTATCTGCTGCTATGGTTCCAGCTGCAATGTTGTTGTTGGCTTT |
| | GGCTATTTTTACTGGTTTCGCTGTTCCAGAGACTAAGATGTTAGGTTGGTC |
| | TAAGTGGATTTGGTACATCAACCCATTGTCCTACTTGTTCGAATCCTTGAT |
| | GGTTAACGAATTCCACGGTAGAGAATTTCCATGTGCTCAATTTGTTCCATC |
| | AGGTCCAGCTTACCAAAACATTACTGGTACTGAAAGAGTTTGTTCCGCTG |
| | TTGGTTCAATTCCAGGTGCATCTTCAGTTTTGGGTGATGACTTTTTGAAAA |
| | CCTCCTACAACTACTACAACAAGCACAAGTGGCGTGGTTTTGGTGTTGGT |
| | ATGGCTTATGCTATTTTCTTTTTCGCCGTGTACTTGTTCTTGGCCGAAGTT |
| | AATCAAGGTGCTAAGCAAAACGGTGAGATTTTGGTTTTTCCATTGTCCGTT |
| | GTCAGAAGGTTGAAAAAGCAAAAGAAGTTGTCTCAGCCAAACTCCGGTGG |
| | TGATATTGAAAAAGGTTCAGGTATTGCTTCTACCGTTACCGATAGAAAGTT |
| | GCTGCAAGATTCTTCCGAATCTTTGACCTCTAGTGAAGATGACGTTGGTTT |
| | GTCAAAGTCTGATGCCATTTTTCATTGGAGGGACTTGTGTTACGAAGTCC |
| | AGATCAAGAAAGAAACCAGAAGGATCTTGAACAACGTTGATGGTTGGGTT |
| | AAGCCAGGTACTTTGACTGCTTTGATGGGTGCATCAGGTGCTGGTAAAAC |
| | TACTTTATTAGATTGCTTGGCAGAAAGGACCACTATGGGTGTCATTACAG |
| | GTAACATTTTCGTCAACGGTAACTTGAGGGATGAATCTTTCCCAAGATCTA |
| | TTGGTTACTGTCAACAACAAGACTTGCATTTGACTACCGCTACTGTTAGAG |
| | AAAGCTTGAAGTTTTCTGCCTACTTGAGACAACCAGCTTCTGTTCCAACTG |
| | AAGAAAAAGATAGATACGTCGAAGAAGTGATCAAGGTCTTGGAAATGGAA |
| | ACTTATGCTGATGCAGTTGTTGGTGTTGCTGGTGAAGGTTTGAATGTTGA |
| | ACAAAGAAAGCGTTTGACCATCGGTGTTGAATTGGTTGCTAAACCAGCTT |
| | TGCTTGTTTTCTTGGATGAACCTACATCTGGTTTGGATAGTCAAACTGCTT |
| | GGTCTATTTGCCAGCTGATGAAGAAATTGGCTAACCATGGTCAAGCTATT |
| | TTGTGCACTATTCATCAACCATCCGCTATGTTGATGCAAGAATTTGATAGG |
| | CTGTTGTTCTTGAAAAGAGGCGGCGAAACTGTTTACTTTGGTGAATTAGG |
| | TGATGGTTGCCATACCATGATTGACTACTTTGAAAGAAACGGTGCTCATAA |
| | GTGTCCACCAGATGCTAATCCAGCAGAATGGATGTTGGAAGTTGTAGGTG |
| | CTGCTCCAGGTTCTCATGCTAATCAAGATTATCATCAAGTCTGGCGTTCAT |
| | CCGATGAGTACAAAGCTGTTAGACAAGAATTGGACCAAATGGAAAGAGAA |
| | TTGCCAAACAAGACTACCTCTTTGATGGACGATTCCGAGAAACATAAGTC |
| | TTATGCTACCCCACTGTTCTATCAAATCAAGTTGGTTTGCTTGAGGTTGTT |
| | CCAACAGTATTATAGATCTCCAGGTTACTTGTGGGCTAAGTTCGCTTTGAC |
| | CATTTTCGATAACTTGTTCATCGGTTTCACTTTCTTCAAGGCCGATAGATC |
| | ATTGCAAGGTCTGCAAAATCAAATGCTGTCCATTTTCATGTTCACCGTCCT |
| | GTTTAACAACTTGTTGCAGCAATACTTGCCTTTGTTCGTTCAACAGAGAAA |
| | CTTGTACGAAGCTAGGGAAAGATCTTCCAGAGTTTTTAGTTGGAAGGCTT |
| | TCATTGTCTCCCAAATCGTTGTAGAAGTCCCATGGAATATTTTGGCTGGTA |
| | CTTTGGCTTACCTGATCTATTACTATGCCGTTGGTTTTTACTCTAATGCTTC |
| | AGCTGCTGGTCAATTGCATGAGAGAGGTGCTTTGTTTTGGTTGTTCTCTAT |
| | CGGTTTCTACGTCTACATTGGTTCTATGGGCGTTTTGTGCATTTCCTTTAT |
| | GGAATTGGCTGAAACTGCTGCTAATTTGGCTTCTTTGTTGTTCACCATGTG |
| | TTTGTCTTTCTGCGGTGTTATGGTTACTAAGGATGTCATTCCAAGGTTTTG |
| | GATCTTTATGTACAGATGCAACCCCTTGACTTACTTGATTGAAGCTTTCTT |
| | GGCATTGGGTATTGCTAACGTTAATGTCACCTGTTCCGATTACGAATTGAT |
| | TAAGTTTACTCCAGTGCCAGGTCAAACTTGTGGTGAGTATATGGCTCCAT |
| | ATATTCAAAAAGCTGGTACTGGTTACTTGCAAGACCCAAATGCTACTGATG |
| | TTTGTCAGTTCTGTCAATTCTCCTACACCAACGATTTCTTGGCTACATTGG |
| | GTTGTAAATACTCTCATAGATGGCGTAACTACGGTATCTTCATCTCCTTTA |
| | TCGTTTTCAACTATGTTGCCGCCGTTTTCTTCTACTGGTTGGCTAGAGAAC |
| | CTAAATCTAAGGGTAAGATCTGCAAAAAGAAAGAAGAGAAGTCCAAGAAG |
| | TAA |
| SEQ ID | MGLPEEPQDNSSGSSDVPVYNGFDVKAQEKVRQLARTLTEQSASGSIGAGG |
| NO: 996 | HTADDGAVVERGDAQSLFSVRSRAGVNPVFDGESDAQYDARLDPKSDEFV |
| | SAQWIKNMSRLSHEDPDYFKPYSLDCCWRDLSASGASADVAYQSTFVNAPK |
| | KYLGQAYRAITPAKEVNRFEILKPMDGLLNPGELLVVLGRPGSGCTTLLKSIS |
| | SNTHGFKISKESHVSYKGISPRDINKHFRGEVVYNAEADIHLPHLTVYQTLLTV |
| | ARLKTPANRVKGVSREAWAHHMTEVAMATYGLSHTRNTKVGNDIVRGVSG |
| | GERKRVSIAEVAICGSKFQCWDNATRGLDSATALEFVRALKTQADIANTAAA |
| | VAIYQCSQDAYDLFDKVCVLDGGYQIYFGPAKDAKRYFQEMGYVCPDRQTT |
| | ADFLTAVTSPAERIVNEEFIKKGIRVPQTPKEMSDYWRNSSEYRKLIAQIDAK |
| | MAENDEEERVRIKESHIASQSKRARASSPYMVSYMMQVKYLLIRNVWRIRNS |
| | SAIALFQVIGNSVMALILGSMFYQVMKGDSTATFYFRGSAMFFGLLFNAFSSL |
| | LEIFSLYEARPITEKHRTYSLYHPSADAFASVLSEIPTKLMTAVCFNIIFYFMVN |
| | FRRNAGRFFFYFLINIVATFTMSHLFRCVGSLTKTLSAAMVPAAMLLLALAIFT |
| | GFAVPETKMLGWSKWIWYINPLSYLFESLMVNEFHGREFPCAQFVPSGPAY |
| | QNITGTERVCSAVGSIPGASSVLGDDFLKTSYNYYNKHKWRGFGVGMAYAIF |
| | FFAVYLFLAEVNQGAKQNGEILVFPLSVVRRLKKQKKLSQPNSGGDIEKGSGI |
| | ASTVTDRKLLQDSSESLTSSEDDVGLSKSDAIFHWRDLCYEVQIKKETRRILN |
| | NVDGWVKPGTLTALMGASGAGKTTLLDCLAERTTMGVITGNIFVNGNLRDES |
| | FPRSIGYCQQQDLHLTTATVRESLKFSAYLRQPASVPTEEKDRYVEEVIKVLE |
| | METYADAVVGVAGEGLNVEQRKRLTIGVELVAKPALLVFLDEPTSGLDSQTA |
| | WSICQLMKKLANHGQAILCTIHQPSAMLMQEFDRLLFLKRGGETVYFGELGD |
| | GCHTMIDYFERNGAHKCPPDANPAEWMLEVVGAAPGSHANQDYHQVWRS |
| | SDEYKAVRQELDQMERELPNKTTSLMDDSEKHKSYATPLFYQIKLVCLRLFQ |
| | QYYRSPGYLWAKFALTIFDNLFIGFTFFKADRSLQGLQNQMLSIFMFTVLFNN |
| | LLQQYLPLFVQQRNLYEARERSSRVFSWKAFIVSQIVVEVPWNILAGTLAYLIY |
| | YYAVGFYSNASAAGQLHERGALFWLFSIGFYVYIGSMGVLCISFMELAETAA |
| | NLASLLFTMCLSFCGVMVTKDVIPRFWIFMYRCNPLTYLIEAFLALGIANVNVT |
| | CSDYELIKFTPVPGQTCGEYMAPYIQKAGTGYLQDPNATDVCQFCQFSYTN |
| | DFLATLGCKYSHRWRNYGIFISFIVFNYVAAVFFYWLAREPKSKGKICKKKEE |
| | KSKK- |
| SEQ ID | ATGAACAGCTCTACCCACTACGATGATGTCTCTCAAAAATCTTCTACCGTT |
| NO: 997 | AACGATTCCGCCGATGATAACAAAATTCCAGAATACCATGGTTTCGACAA |
| | AGAGGTTTCTTCTGAAGTTCAAAATTTGGCCAGAATGATGTCCAGACCTTC |
| | TATTGATAAGGCTTCTTCATTGGCTAGAACCCTGTCTAATATGTCTCAAGT |
| | TCCAGGTTTGAATCCAATGGCTAAAGATGAAGGTGAATTGGACCCAAGAT |
| | TGGATCCAGATTCTGATTCTTTCGATTCTAAGTTCTGGGTCAAGAACTTGA |
| | GGAAGATGCATAATTCTGATCCAGCTTACTACAAGCCAGCTTCTTTGGGT |
| | GTTGCTTACAAAGATTTGAGAGCTTACGGTATTGCTACCGATGCTGATTAT |
| | CAAGCTAATGTTGGTAACGTTGTCTACAAGACCATTTCTCAAACCATCAAG |
| | GGTTTCTTCGATAAGAACAACGATGATGCCAAGTTCGATATCTTGAAACCT |
| | ATGGACGGTTTGATTAGACCAGGTGAAGTTACTGTTGTTTTGGGTAGACC |
| | TGGTGCTGGTTGTTCTACATTCTTGAAAACCATTTCTTCTAACACCCACGG |
| | TTTCACTGTTGCTAAAGATTCTGTTTTGTCCTACGACGGTTTAAAGCCAAA |
| | CGATATCATTAAGCACTTCAGAGGTGATGTTGTTTACTGTGCTGAAACCG |
| | AATCTCATTTCCCACAATTGACTGTTGGTCAAACTTTGGATTTTGCTGCTA |
| | AGTTGAGAACCCCTCAAAACAGACCAGAAGGTGTTTCTAGAGAAGAATAT |
| | GCTGCTCATATGACCAAGGTTATTATGGCTACTTATGGTTTGTCCCATACC |
| | AGAAATACCAAGGTTGGTAATGATTTCATCAGAGGTGTTTCAGGTGGTGA |
| | AAGAAAGAGAGTTTCTATTGCTGAAGTTGCTTTGTCCTTCGCTTCTTTACA |
| | ATGTTGGGATAACTCTACCAGAGGTTTGGATTCTGCTACTGCTTTGGAATT |
| | CATTAAGGCTTTGAAAACCTCTGCCACTGTTTTGAATGCTACTCCAATGAT |
| | TGCTATCTACCAATGCTCTCAAGATGCCTACGATTTGTTCGATAAGGTCAT |
| | CTTGTTGTACGAAGGTTACCAAATTTTCTTCGGTGATTGCAAGCAAGCCAA |
| | GTTGTACTTTTTGGAAATGGGTTACGATTGCCCACAAAGACAAACTACTG |
| | CTGATTTCTTGACCTCTTTGACTAACCCATCTGAAAGAGTTGTAAGACCAG |
| | GTTACGAAAACAAGGTTCCAAGAACACCAGAAGAATTCTACACTTACTGG |
| | CAAAACTCTCCAGAAAGAAAAGCTTTGTTGGGTGAAATCGATGACTACTT |
| | GAACAAGACCGATAACGAAGAAAGATTGCAACAATTCAAGGATGCCCATA |
| | ACACCAAGCAATCTAATCACTTAAGACCAGCTTCTCCATACACTGTCTCTT |
| | ACGGTTTACAAGTCAAGTACATCATGGGCAGAAACATTATGAGAACTAAG |
| | GGTGATCCATCCATCACCTTGTTCTCTATTTTTGGTAACACCGTCATGGGC |
| | TTGATCATCTCTTCTATTTTCTACAATTTGGACGACACCACCGGTTCTTTTT |
| | ACTATAGAACAGTTGCTATGTTTTTCGCCGTTTTGTTCAACGCTTTCTCCT |
| | CCTTGTTGGAAATTTTTGCCTTGTATGAAGCCAGACCAATCGTTGAAAAAC |
| | ACAAAACTTATGCCCTGTACCATCCATCTGCTGATGCTTTTGCTTCTATTA |
| | TTACTGAGTTGCCACCAAAGCTGCTGGTTTCTATTTCTTTTAACTTGGTGC |
| | TGTACTTCATGGTCAACTTTAGACGTAATGCTGGCAACTTCTTCTTCTACT |
| | TGTTGGTTAATTTCACCGCCACCTTGTCTATGTCTCATTTGTTTAGAACTAT |
| | TGGCTCCGCTACCAAGTCTTTGTCTCAAGCTATGACTCCAGCTTCAGTTTT |
| | GTTGTTGGCTTTGACTATTTTCACCGGTTTCGTTATTCCAACTCCAGAAAT |
| | GTTAGGTTGGTGTAGATGGATCAATTACTTGGATCCTATTGGTTACGCTTT |
| | CGAAGCTTTGATTGCTAACGAATTCCATGGTAGAGATTTCGACTGTTCTCA |
| | ATTTGTTCCATCTGGTCCAGGTTATCCAACTTCTGGTAACTCTATTATCTG |
| | CTCCGTTGTTGGTTCACAACCAGGTTCTGATATAGTTAACGGTGATGACT |
| | ACATTAGGGGTTCTTACGAGTACTACTTTTCTCATAGATGGCGTAATTGGG |
| | GTATTGTCGTTGGTTTCGTTGTTTTCTTCTTGTTCGTTCACATTATCATCTG |
| | CGAGTACAACAAAGGTGCTATGCAAAAGGGTGAGATCCTGTTGTTTCAAA |
| | GATCTGCTTTGAAGAAGAACAAGAGACAACGTAAGGATATCGAGTCCGGT |
| | AACATTGAAAAAGTTGGTCCAGAATTCAACAACGAGAAAACCCCAGATAA |
| | CGAAATCGATAACAAGTTGCCATCCTCCGGTGATATTTTTCATTGGAGAG |
| | AATTGACCTACCAGGTCAAGATTAAGTCCGAAGATAGAGTCATCTTGAAC |
| | TCTGTTGATGGTTGGGTTAAGCCTGGTCAAGTTACTGCTTTAATGGGTGC |
| | TTCAGGTGCTGGTAAAACTACTTTGTTGAATGCCTTGTCTGACAGATTGAC |
| | CTCTGGTGTTATTACTTCAGGTGTCAGAATGGTTAATGGTCACGAATTGG |
| | ATGCTTCGTTCCAAAGATCAATCGGTTACGTTCAACAACAAGACTTGCACT |
| | TGCAAACCTCTACTGTTAGAGAAGCCTTGACTTTTTCTGCCTATTTGAGAC |
| | AACCTAAGTCTGTCCCAAAATCCGAAAAGGATTCTTACGTTGATTACATCA |
| | TCAGGTTGTTGGAGATGGAAAAGTACTCTGATGCTGTTGTTGGTGTTAGT |
| | GGTGAAGGTTTAAATGTCGAACAGAGAAAAAGATTGACCATCGGCGTTGA |
| | ATTGGTTGCTAAACCTAAGTTGTTGGTCTTTTTGGATGAACCTACATCTGG |
| | TTTGGATAGTCAAACTGCTTGGTCTATCTGCAAGTTGATTAGAAAGTTGGC |
| | TGATCACGGTCAAGCTATTTTGTGTACTATTCATCAACCATCCGCCATCCT |
| | GTTGAAAGAATTTGATAGACTGTTGTTCTTGCAGAGAGGTGGTAAGACTG |
| | TTTACTTTGGTGATTTGGGTGATAACTGCCAAACCTTGATTGACTACTTTG |
| | AAAAGTACGGTGCTCCAAAATGTCCACCAGATGCTAATCCAGCTGAATGG |
| | ATGTTGGAAGTTATTGGTGCTGCTCCAGGTTCTCATGCTTCACAAGATTAT |
| | TATGATGTCTGGATGAACTCCACCGAGTACAGAGAAGTTAAGGGTGAATT |
| | AGATGTCATGGAACAAGAGTTGGTGAAAAAGCCAAAAGACGATTCTCCAG |
| | AATCTATGAAGACTTTCGCTGTTCCAATGTGGCAACAGTACATTAACGTTA |
| | CTCATAGAGTCTTGCAGCAGTATTGGAGAACTCCATCTTATACCTACTCCA |
| | AGGTTTTGATGTCCATCTTCTCGTCTTTGTTTAACGGTTTCGCTTTCTTCAA |
| | GGCTAACAACACTATGCAAGGCTTGCAAAATCAAATGTTCTCCGTGTTCAT |
| | GTTCTTCGTCATTTTCAACACTTTGACCCAGCAATACTTGCCCAACTATGT |
| | TTCTCAAAGAGACTTATACGAAGCCAGAGAAAGACCATCTAAAACCTTTTC |
| | TTGGGTTGCTTTCATTACCGCTCAAATTACAGCTGAAATCCCATGGCAAAT |
| | ATTGACTGGTACTTTGGCTTTCTTCTGTTGGTATTATCCAATTGGCTTGTA |
| | CGGTAATGCTGAAGCTACTGATACTGTTTCACAAAGGGGTGCTTTGATGT |
| | GGATTATCATCGTCTTGTTTTTCATCTACTGCTCCACTATGGCTCAATTGT |
| | GCATTTCCTTTATGGAAGTTGCTGATAACGCTGCTAATTTGGCCTCTTTGT |
| | TGTTCACTATGTGTTTGACTTTCTGCGGTATTTTGGCTTCTCCAGATGCAA |
| | TGCCAGGTTTCTGGATTTTTATGTACAGATGCAACCCCTTCTCCTACTTGG |
| | TTTCTGCTATTTTATCTGTTGCCTTGCAGGATTCCTCTGTTACTTGTTCTGA |
| | CAAAGAACTGTTGAGATTCGAACCTGAAGGTGGTCAAACATGTGGTGAGT |
| | ATATGCAATCTTACATCCAAAATGCTGGTGGCTACTTGATCTCTAATGATA |
| | CAACTGGTTCTTGCGAATACTGCACTATCTCTTCCACTAACGTTTTCTTGG |
| | AATCCGTTTCTGTTGACAAGACCAAGAGATCTAGAGATATCGGTATTTTCT |
| | TCTGCTTCATCGTCATCAACATGATTGGCACCGTTTTCTTTTATTGGTTGG |
| | CTAGAGTTCCTAAGAGGTCCAGACAAAAGTAA |
| SEQ ID | MNSSTHYDDVSQKSSTVNDSADDNKIPEYHGFDKEVSSEVQNLARMMSRP |
| NO: 998 | SIDKASSLARTLSNMSQVPGLNPMAKDEGELDPRLDPDSDSFDSKFWVKNL |
| | RKMHNSDPAYYKPASLGVAYKDLRAYGIATDADYQANVGNVVYKTISQTIKG |
| | FFDKNNDDAKFDILKPMDGLIRPGEVTVVLGRPGAGCSTFLKTISSNTHGFTV |
| | AKDSVLSYDGLKPNDIIKHFRGDVVYCAETESHFPQLTVGQTLDFAAKLRTPQ |
| | NRPEGVSREEYAAHMTKVIMATYGLSHTRNTKVGNDFIRGVSGGERKRVSIA |
| | EVALSFASLQCWDNSTRGLDSATALEFIKALKTSATVLNATPMIAIYQCSQDA |
| | YDLFDKVILLYEGYQIFFGDCKQAKLYFLEMGYDCPQRQTTADFLTSLTNPSE |
| | RVVRPGYENKVPRTPEEFYTYWQNSPERKALLGEIDDYLNKTDNEERLQQF |
| | KDAHNTKQSNHLRPASPYTVSYGLQVKYIMGRNIMRTKGDPSITLFSIFGNTV |
| | MGLIISSIFYNLDDTTGSFYYRTVAMFFAVLFNAFSSLLEIFALYEARPIVEKHK |
| | TYALYHPSADAFASIITELPPKLLVSISFNLVLYFMVNFRRNAGNFFFYLLVNFT |
| | ATLSMSHLFRTIGSATKSLSQAMTPASVLLLALTIFTGFVIPTPEMLGWCRWIN |
| | YLDPIGYAFEALIANEFHGRDFDCSQFVPSGPGYPTSGNSIICSVVGSQPGSD |
| | IVNGDDYIRGSYEYYFSHRWRNWGIVVGFVVFFLFVHIIICEYNKGAMQKGEIL |
| | LFQRSALKKNKRQRKDIESGNIEKVGPEFNNEKTPDNEIDNKLPSSGDIFHWR |
| | ELTYQVKIKSEDRVILNSVDGWVKPGQVTALMGASGAGKTTLLNALSDRLTS |
| | GVITSGVRMVNGHELDASFQRSIGYVQQQDLHLQTSTVREALTFSAYLRQPK |
| | SVPKSEKDSYVDYIIRLLEMEKYSDAVVGVSGEGLNVEQRKRLTIGVELVAKP |
| | KLLVFLDEPTSGLDSQTAWSICKLIRKLADHGQAILCTIHQPSAILLKEFDRLLF |
| | LQRGGKTVYFGDLGDNCQTLIDYFEKYGAPKCPPDANPAEWMLEVIGAAPG |
| | SHASQDYYDVWMNSTEYREVKGELDVMEQELVKKPKDDSPESMKTFAVPM |
| | WQQYINVTHRVLQQYWRTPSYTYSKVLMSIFSSLFNGFAFFKANNTMQGLQ |
| | NQMFSVFMFFVIFNTLTQQYLPNYVSQRDLYEARERPSKTFSWVAFITAQITA |
| | EIPWQILTGTLAFFCWYYPIGLYGNAEATDTVSQRGALMWIIIVLFFIYCSTMA |
| | QLCISFMEVADNAANLASLLFTMCLTFCGILASPDAMPGFWIFMYRCNPFSYL |
| | VSAILSVALQDSSVTCSDKELLRFEPEGGQTCGEYMQSYIQNAGGYLISNDT |
| | TGSCEYCTISSTNVFLESVSVDKTKRSRDIGIFFCFIVINMIGTVFFYWLARVPK |
| | RSRQK- |
| SEQ ID | ATGGAAACCGACTCCTCATCTTCTAAACCAGATGGTTATCATGGTTTGGA |
| NO: 999 | CTCTAAGACTGAAGAACACATTAAGGCTTTGGCTAGAACTTTGTCTAGAAC |
| | CTCTTTGAACAGACAGATTTCCTTGCAAGCTTCTGGTAATGGTGCTTCTAA |
| | ATTCGATGAAGTCAAGTCCATCTTCTCCTCTTCATACTCTGGTGTTAATCC |
| | AGTTTTCTTGGATCCATCTGCTCCAGGTTATGATGCTAGATTAGATCCAAA |
| | CTCCGAACATTTTTCTTCAGCTGCTTGGGTTAAGAACATGGTTGCTTTTTC |
| | TATGCAAGACCCCGATTACTACAAGCACTATACAATTGGTTGTTGCTGGA |
| | AGGATTTGAGAGCTTTTGGTGATTCTAACGATGTCTCTTACCAATCTACTG |
| | TTACTACTTTGCCAGGTAAGTACTTGGGTAAGATCAAGAGACATTTCACC |
| | GCTACAAAAGAAGAGGACGTTTTCGATATTTTGAAGCCAATGGATGGTTT |
| | GGTTAAGCCAGGTGAATTATTGGTTGTATTGGGTAGACCAGGTGCTGGTT |
| | GTTCTACTTTGTTGAAAACTATTTCCGCCAACGTCGAAGGTTACTCTATTG |
| | ATCCAAATTCCACCATCTCTTACAACGGTTTGGATCCTAAGGTTATCAAAA |
| | AGCACTTCAGAGGTGAAGTTGTTTACAACGCTGAAGGTGATATTCATTTC |
| | CCACATTTGACTGTCTACGAAACCTTGAATATCGTTGCTTTGTTGGCTACT |
| | CCATCCAATAGAATCAAAGGTGTGTCTAGAGAAGAATTCGCTAAGCACAT |
| | TACTGAAGTTGCTATGGCTACTTATGGTTTGTCTCATACCAAGAACACAAA |
| | GGTTGGTGGTGATTTGGTTAGAGGTGTTTCTGGTGGTGAAAGAAAGAGA |
| | GTTTCTATTGCCGAAGTTACCATTTGCGGTTCTAAGTTTCAATGTTGGGAT |
| | AACGCTACTAGAGGTTTGGATTCTGCTACTGCTTTGGAATTCATTAGAGC |
| | CTTGAAAACCTCCACCGATATTTCTGGTTCTACTGCTGTTATTGCTATCTA |
| | CCAATGTTCCCAAGATGCCTACGATTTGTTCGATAAGGTTTGCGTTTTGGA |
| | TGAAGGTTACCAAATCTTTTTCGGTTACGCTAAGGATGCCAAAAAGTACTT |
| | CGAAAACATGGGTTATGTTTCCCCAGCTAGACAAACTACTGCTGATTTCTT |
| | GACAGCTGTTACTAATCCAGCTGAAAGAATCGTTAATCAGGACTACGTAA |
| | AAGAAGGCAGATTCATTCCATCTACCGCCAAAGAAATGGAAGAATATTGG |
| | AGAAATTCCCCAGAGTACAAGCAATTGCATGCCGATATTGAAGAAGAGTT |
| | GTCCAAAGATTCCGCCAAGAATTTCCAACAGTTGCAAGAATCTCATGTCG |
| | CCAAACAATCTAAGGGTCAAAGAAAAGGTTCTCCCTACATCGTTAACTACA |
| | GAATGCAAGTGAAGTACCTGACCATCAGAAACATCATGAGAATCAAGAGA |
| | TCCTTCTCTGTTACCTTGGGTTCTATTTTCGGTAACATCTTCATGTCCTTG |
| | ATCCTGGGTTCCATCTTTTACAAATCTATGAAGCACACGAACACCAACAC |
| | GTTTTTCTATAGAGGTGCTGCTATGTTTACCGCCGTTTTGTTTAATTCCTT |
| | CAGCTCCATGTTGGAGATCTTCACATTATATGAAGCCAGACCAATCACTG |
| | AAAAGCACAAGAGATACAGCTTGTATCATCCTTCTGCTGATGCTTTAGCTT |
| | CCATGATGTCTGAATTGCCAGCTAAAATCGTTACCGCTATTTGCTTCAACC |
| | TGATCTTGTACTTTATGGCCAACTTCAGAAGAGAACCAGGTCCATTCTTTT |
| | TCTACTTCATGATGTCATTCTTGGCCACCTTGGTTATGTCCTCTATTTTCA |
| | GATGTATTGGTGCTGCTGCTAAGACTTTGTCTGAAGCTATGGTTCCATCC |
| | TCCATTTTGTTGTTGGCCATTTCATTATACGTCGGTTTCTCTGTTCCAAAG |
| | AAGTCTTTGTTAGGTTGGTCTAAGTGGATCTGGTACATTAACCCAATCTCG |
| | TACATCTTCGAGAGCTTGATGATCAATGAATTCAACGGTAGAGAATTCCCA |
| | TGCGCTGTTTTTATTCCATCAGGTCCTGGTTACGAAAATGTTTCTGCTACA |
| | GAAAAGGTCTGTAACACCGTTGGTTCAAAACCAGGTTTGCCATACGTTTC |
| | TGGTAAGGATTTTATCGTTCAAGCCTATGGTTATGATCCAGCTCATAGATG |
| | GCGTGGTTTTGGTATTGCTTTGGCTTACTTCATTTTCTTCTCCGCCGTTTA |
| | CTTGTTGTTCTGTGAGTATAACGAATCCGCTGTTCAAAAGGGTGAAATCTT |
| | GGTTTTTCCAAAGGCCGTTTTGAAGAAGGCTAAGAAAGAAGCTTTATCCA |
| | GACCAAAGTCTGATATCGAAACTGGTGAAGATCCAGAAGGTGGTATTACT |
| | GATAGAAAGTTGTTGCAGGATTCCCAAGAAGATTCCAACGAATCTGTTGA |
| | CGAAAAGCAATCCGAAATTGCCTTGGAAAAATCTGGTGCTGTTTTTCATTG |
| | GAGGAACGTTTGTTACGATGTCCAGATCAAGAAAGAAACCCGTAGAATCT |
| | TGTCTAACGTTGATGGTTGGGTGAAACCAGGTACTTTGACTGCTTTGATG |
| | GGTTCTTCTGGTGCAGGTAAAACTACTTTATTGGACTGTTTGGCTTCCAGA |
| | GTTACCATGGGTGTTATTACTGGTGATATGTTCGTTAACGGTCACTTGAGA |
| | GATAACTCATTCCCTAGATCTATTGGTTACTGTCAACAACAAGACTTGCAT |
| | TTGTCTACTGCTACCGTTAGAGAATCCTTGAGATTTTCTGCTTACTTGAGA |
| | CAACCATCCTCCGTTAGTATTGAAGATAAGAACAGATACGTCGAACACGT |
| | CATCAGAATGTTAGGTATGGAAAAGTACGCTGATGCTGTTGTTGGTGTAA |
| | CAGGTGAAGGTTTGAATGTCGAACAAAGAAAGCGTTTGACCATCGGTGTT |
| | GAATTGGCTGCTAAACCTAAGTTGTTGTTGTTTTTGGACGAACCTACCTCT |
| | GGTTTGGATAGTCAAACTGCTTGGTCTGTTTGTCAGCTGATGAGAAAATT |
| | GGCTGATCATGGTCAAGCTATTTTGTGCACTATTCATCAACCATCCGCTTT |
| | GTTGATGCAAGAATTTGATAGGCTGCTGTTCTTGCAAAAAGGTGGTAAGA |
| | CTGTTTACTTCGGTGACTTAGGTCATGGTTGCCAAACTATGATTGATTACT |
| | TTGAAAGAAACGGTGCCCATAAGTGTCCTGAAGGTGCTAATCCTGCAGAA |
| | TGGATGTTGGAAGTTATTGGTGCAGCTCCTGGTTCTTCATCTACAGTTGAT |
| | TACCATGAAGTTTGGCGTAACTCTGAAGAGTACAGAATGGTCCAAAAAGA |
| | ACTAGACTGGATGGAAGTTGAGTTGGCTAAAAAGCCCATGGATACAACCG |
| | AAGAACAAAACGAATTTGCTACCTCTTTGCCCTACCAATTCAAGATAGTTA |
| | CTACCAGGTTGTTCCAACAATATTGGCGTACACCATCTTACATTTGGTCCA |
| | AGGCATTTTTGACCGTTTTCTCCCAAATTTTCATCGGCTTCACTTTCTTCAA |
| | AGCCAAGTTGACATTGCAAGGCTTGCAGAATCAAATGTTCGCTACTTTCA |
| | CTTTCACCATCATTTTCAACCCAGCTTGCCAACAATACTTGCCCTTGTTTG |
| | TTTCTCAAAGGGACTTGTATGAAGCTAGAGAAAGACCATCTAGAACGTTTT |
| | CATGGTTGGCTTTCATCTACTCCCAAATCATCGTTGAAATCCCATTCAACA |
| | TCTTGTTGGGTACTGTTGCTTTCTTCGTTTTCTATTACCCAGTGGGTTTTTA |
| | CAACAACGCTTCTTATGCTGGTCAATTGCACGAAAGAGGTGTCTTGTTTT |
| | GGTTGTTTTGTGTCGAGTTTTACATCTACATCTCTTCCATGGCTCAATTGT |
| | GTATTGCAGGTTTGGAACATGCTGAATCTGCTGGTAACATTTCCTCTATCT |
| | TGTTCACCATGTCTTTGATGTTCTGTGGTGTTTTCGGTGGTCCAGGTGTTT |
| | TGCCTAAATTTTGGAATTTCATGTACCGTGTCTCTCCCTTGACATACTTCA |
| | TTGATGGTTTGTTGTCTACCGGTTTGGCTAATACCAAAGCTGTTTGTGCTG |
| | ATTACGAATACGTTCACTTCGATCCAAAATCCGGTCAAACTTGTGGTAAAT |
| | ACTTGGCCAACTACATCAAAGCCTTTGGTGGTTACTTGGCTAATCCAGAT |
| | GCTACTAATGATTGCTCCTACTGCAAGATCTCTGAATCTAACACTTTCCTG |
| | AAGTCCTTCAAGTCCTCTTATCATAAGCGTTGGAGAAACTTCGGTATCTTC |
| | TTAGTGTTTATCGTTTTTGATTGGGCTGCCTGCATGTTCTTGTATTGGTTA |
| | GCTAGAGTTCCTAAGAAGAAAAACAGAGTCTCCAATGAGAGAAACCCAGA |
| | CAAGTTGAACAATCAAGAGGACAAGAACAAAGAGAAGGTCTAA |
| SEQ ID NO: | METDSSSSKPDGYHGLDSKTEEHIKALARTLSRTSLNRQISLQASGNGASKF |
| 1000 | DEVKSIFSSSYSGVNPVFLDPSAPGYDARLDPNSEHFSSAAWVKNMVAFSM |
| | QDPDYYKHYTIGCCWKDLRAFGDSNDVSYQSTVTTLPGKYLGKIKRHFTATK |
| | EEDVFDILKPMDGLVKPGELLVVLGRPGAGCSTLLKTISANVEGYSIDPNSTIS |
| | YNGLDPKVIKKHFRGEVVYNAEGDIHFPHLTVYETLNIVALLATPSNRIKGVSR |
| | EEFAKHITEVAMATYGLSHTKNTKVGGDLVRGVSGGERKRVSIAEVTICGSK |
| | FQCWDNATRGLDSATALEFIRALKTSTDISGSTAVIAIYQCSQDAYDLFDKVC |
| | VLDEGYQIFFGYAKDAKKYFENMGYVSPARQTTADFLTAVTNPAERIVNQDY |
| | VKEGRFIPSTAKEMEEYWRNSPEYKQLHADIEEELSKDSAKNFQQLQESHVA |
| | KQSKGQRKGSPYIVNYRMQVKYLTIRNIMRIKRSFSVTLGSIFGNIFMSLILGSI |
| | FYKSMKHTNTNTFFYRGAAMFTAVLFNSFSSMLEIFTLYEARPITEKHKRYSL |
| | YHPSADALASMMSELPAKIVTAICFNLILYFMANFRREPGPFFFYFMMSFLAT |
| | LVMSSIFRCIGAAAKTLSEAMVPSSILLLAISLYVGFSVPKKSLLGWSKWIWYI |
| | NPISYIFESLMINEFNGREFPCAVFIPSGPGYENVSATEKVCNTVGSKPGLPY |
| | VSGKDFIVQAYGYDPAHRWRGFGIALAYFIFFSAVYLLFCEYNESAVQKGEIL |
| | VFPKAVLKKAKKEALSRPKSDIETGEDPEGGITDRKLLQDSQEDSNESVDEK |
| | QSEIALEKSGAVFHWRNVCYDVQIKKETRRILSNVDGWVKPGTLTALMGSSG |
| | AGKTTLLDCLASRVTMGVITGDMFVNGHLRDNSFPRSIGYCQQQDLHLSTAT |
| | VRESLRFSAYLRQPSSVSIEDKNRYVEHVIRMLGMEKYADAVVGVTGEGLNV |
| | EQRKRLTIGVELAAKPKLLLFLDEPTSGLDSQTAWSVCQLMRKLADHGQAIL |
| | CTIHQPSALLMQEFDRLLFLQKGGKTVYFGDLGHGCQTMIDYFERNGAHKC |
| | PEGANPAEWMLEVIGAAPGSSSTVDYHEVWRNSEEYRMVQKELDWMEVEL |
| | AKKPMDTTEEQNEFATSLPYQFKIVTTRLFQQYWRTPSYIWSKAFLTVFSQIFI |
| | GFTFFKAKLTLQGLQNQMFATFTFTIIFNPACQQYLPLFVSQRDLYEARERPS |
| | RTFSWLAFIYSQIIVEIPFNILLGTVAFFVFYYPVGFYNNASYAGQLHERGVLF |
| | WLFCVEFYIYISSMAQLCIAGLEHAESAGNISSILFTMSLMFCGVFGGPGVLPK |
| | FWNFMYRVSPLTYFIDGLLSTGLANTKAVCADYEYVHFDPKSGQTCGKYLAN |
| | YIKAFGGYLANPDATNDCSYCKISESNTFLKSFKSSYHKRWRNFGIFLVFIVFD |
| | WAACMFLYWLARVPKKKNRVSNERNPDKLNNQEDKNKEKV- |
| SEQ ID NO: | ATGGAAGCCTCTGAATACGGTGGTTTTGATCATAATGCTGAAAACGAGGT |
| 1001 | TAAGAAGATGGCTAAGGCTTTGGTCAAAGAGAACTCTAACAATAGACCAC |
| | TGGACTCCTCATCTATTTCTAGAGTTACTTCTGGTATTAACCCAGTCGGTT |
| | TACAAGAAACTGATACTGGTTACAACGCTAAGTTGGACCCAAATTCTAAC |
| | GACTTCTCATCTGAAGAATGGACCAGAAATTTGGCCAACATCGTTGAATC |
| | TGAACCAGAGTATTACAAGCCACATTCTGTTGGTTGTTGTTGGAAGAATTT |
| | GTCTGCTGCTGGTGATTCTGCTGATTTGACTTACCAAACTACTTTCGGTAA |
| | CTTGCCAGTCAAGATCTTCAGTTTGTTGTACAGACATATCAGGCCATCTAA |
| | GGGTTCTGATAACTTCCAAATTTTGAAGCCAATGGATGGTTTGGTTGACC |
| | CAGGTGAATTATTGGTTGTTTTAGGTAGACCAGGTTCTGGTTGTACTACTT |
| | TGTTGAAGTCTATTTCCTGTAACACCCACGGTTTTAACGTTGGTAAAGATT |
| | CCGTTATCAAGTACTCTGGTATGGCCTCTAAGGACATTAGAAGAAATTTGA |
| | GAGGTGAAGTTGCTTACAACGCCGAATCTGATACTCATATTCCAAACATC |
| | ACTGTCTACCAAACCTTGGTTACTGTTGCTAGATTGAAAACCCCAAGAAAC |
| | AGAATCAGAGGTATCGATAGAGAATCCTGGGCTAAACATATTGCTGAAGT |
| | TACTATGGCTACCTACGGTTTGTTGCATACCAGAAATACCAAAGTTGGTAA |
| | CGACTTGATCAGAGGTGTTTCTGGTGGTGAAAGAAAGAGAGTTTCTATAG |
| | CTGAAGCTACCATTTGTGGTGCTAAGTTTCAATGTTGGGATAACGCTACTA |
| | GAGGTTTGGATTCTGCTACTGCTTTGGAATTTGTTAGAGCTTTGAGAACC |
| | CAAGCCAAGATTAACAATTCTACTGCTTGTGTTGCTATCTACCAATGCTCT |
| | CAACATGCTTACGATTTGTTCGATAAGGTTTGTGTCTTGTATGGTGGTTAC |
| | CAGATCTATTTTGGTCCAACCTCTAACGCCAAAAAGTACTTCGAATCTATG |
| | GGTTACTACTGCCCATCTAGACAAGCTACAGCTGATTTCTTGACTTCTATT |
| | ACTTCTCCAGCCGAAAGAATCGTCAACAGAGAATTTTTGGAACGTAACAT |
| | CGTCGTTCCACAAACTCCAGACGAAATGTACTTGTACTGGCAAAATTCTC |
| | CAGAAAACCACGAATTGCAAAGGGAAATCGATTCTAGATTGACGCAGGAC |
| | TACAAAGAAAACTTGACAGCTATTAAGGCTTCCCATAATGCCGCTCAATCT |
| | AAGAGAGCTAGAAAATCTTCTCCATACACCGTTTCTTATGCCATGCAAGTT |
| | AAGTACCTGCTGATTAGAAATATGTGGCGTATCATTAACTCTCCAGGTGTT |
| | ACTTTGTTCAGAGTGTTCGGTAACATCATCATGTCTTTGGTTTTGGGCTCT |
| | ATGTTCTACAAGGTTCAAAAGACTACTACCACCAACACCTTTTATTACAGA |
| | GGTGCTGCTATGTTTTACTCCATTTTGGTTAACGCCTTCAGCTCCTTGATT |
| | GAAATTTTCGCTTTGTTCGAAGCTAGACCAGTTACTGAAAAACATAAGACT |
| | TACGCCTTGTATAGACCATCTGCTGATGCTTTTGCTTCCTTCTTGTCTGAT |
| | ATTCCAGGTAAGGTTGTTTCTACCGTTGCCTTCTCTATTATCTACTACTTCT |
| | TGGTCAACTTCAGAAGAGATGCCGGTAGATTTTTCTTCTACCTGTTGATTA |
| | ACTTGGTCACCACTTTCACCATGTCTCACTTGTTTAGATGCGTTGGTTCCA |
| | TTTCTAAGACTTTGACTGAAGCTATGGTTCCAGCTAGTGTTTTGTTGTTGA |
| | CTTTGGCTGTTTACACCGGTTTCTCTATTCCTAGAAGATCTATGCATGAAT |
| | GGTCCAAGTGGATCTCTTACATTGATCCATTGTCCTACTTGTTCGAATCCG |
| | TTATGACTAACGAATTCCATGGTAGAAATTTCCCATGCGCTGCTTACATTC |
| | CAAATGGTCCACAATATCAAAACACCACCGGTACTGAAAGAGTTTGTTCT |
| | GTTGTTGGTTCTAAGGCTGGTCATGATTATGTTTTGGGTGATGACTACTTG |
| | AAGCAGTCTTACGAATACGAAATCAAACATAAGTGGCGTGGTTTTGGTGT |
| | TGGTATGGCTTATGTTGTTTTCTTCTTCTTCGTCTACTTGCTGATCTGTGA |
| | GTATAATGAAGCTGCTAAGCAAAAGGGTGACTTGTTGGTTTTTCCAAGAT |
| | CCATCGTTAAGAAAATGAGAAGGCAGGGTACATTGCAGAAGTCTAATTCA |
| | GAACCTGAAGATGTTGAAAAGAACGCCACCATTATTGCTAACGTTTCTCC |
| | AGATTCCTCCTTGTTATTGGATACTTTGGAATCCCCATCCAAGCAAAAGTC |
| | TGAAATCCCATTGAATCAATCCGACACCATTTTCCATTGGAGAAATGTTTG |
| | CTACGATGTCCACATCAAGAAAGAGTCTAGAAGGATCTTGAACAACGTTG |
| | ATGGTTGGGTTAAGCCAGGTACTTTGACAGCTTTGATGGGTGCTTCTGGT |
| | GCTGGTAAAACAACTTTGTTGGATTGCTTGGCTAAAAGGGTTACCACTGG |
| | TGTTATTACTGGTGAAATCTTCGTCAACGGTAAATTGAGGGATGAATCTTT |
| | CCCAAGATCAATCGGTTATTGTCAACAGCAAGACTTGCATTTGAAAACCG |
| | CTACTGTTAGGGAATCCTTGTTGTTTAGTGCTATGTTGAGACAACCTAAGA |
| | AGGTTCCATTGTCTGAAAAGAAGCAATACGTCGAACAGATCATCGAAGTT |
| | TTGGAAATGGTTCCATACGCTGATGCTATCGTTGGTATTGAAGGTGAAGG |
| | TTTGAACGTGGAACAGAGAAAAAGATTGACCATCGGTGTTGAATTGGTTG |
| | CTAAACCTAAGCTGCTGTTGTTTTTGGATGAACCTACATCTGGTTTGGACT |
| | CTCAAACTGCTTGGTCTATTTGCCAGTTGTTGAGAAAGTTGGCTAACAGA |
| | GGTCAAGCTGTTTTGTGTACTATTCATCAACCATCCGCCTTGTTGATTAGA |
| | GAATTTGATCGTTTGCTGTTCTTGCAGAAAGGTGGTAAGACTGTTTACTTT |
| | GGTGAATTGGGTGACGAATGCAAGACCATGATTGATTACTTCGAAAGAAA |
| | TGGTGCTCATAAGTGTCCACCAGATGCTAATCCAGCTGAATGGATGTTGG |
| | AAGTTGTTGGTGCTGCTCCAGGTACTCATGCTTCTCATGATTACAATGAA |
| | GTTTGGAGGAACTCCGAAGAGTACAAAGAAGTTCAACAAGAATTGGACAG |
| | GATGGAATCTGAATTGAAATGTGTCGGTGAAGAGGACTCTTCCGAAAAAC |
| | ATCAAGCTTTTGCTACCGACATCTTCTCCCAAATATTGATTGTCTCTCACA |
| | GATTCTTCCAGCAGTATTGGAGAACACCACAATATTTGTGGCCAAAGTTC |
| | ATTTTGACTGCCTTCGACGAAATTTTCATCGGCTTTACTTTCTTCAAGGCC |
| | ACCAGATCTTTACAAGGCTTGCAAAATCAAATGCTGTCCACCTTTGTTTTC |
| | TGCGTTGTTTACAATGCTTTGTTGCAGCAATTCTTGCCAGTTTACGTTGAG |
| | CAAAGAAACTTGTACGAAGCAAGAGAAAGACCATCTAGAACCTTCTCTTG |
| | GTTTTCCTTCATCTCCTCACAAATCTTGGTTGAAGTTCCCTGGAACATTAT |
| | TGCAGGTACTATTGCTTTCTTCGTGTACTACTATCCAGTTGGTTTCTACGC |
| | TAATGCCTCTGAAGCTAATCAATTGCACGAAAGAGGTGCATTATACTGGTT |
| | GTTCTGTACCGCTTTCTTTGTTTGGATAGGTTCCATGGGTATTCTGGCCAA |
| | TTCTTTCTTGGAACATGCTGCTGAAGCTGCAAATGTTGCTTTATTGTGTTT |
| | CGCTTTCTCTTTGGCTTTTTGCGGTGTTTTGGTTCCACCAAAGTTATTGCC |
| | AGGTTTCTGGATCTTTATGCACAGAGTTTCTCCACTGACCTACTACATTGA |
| | TTCAGCTTTGTCTTTGGGTATTGCCAACGTTGACGTTAAGTGCTCTGAAAT |
| | CGAATACGTTAAGTTCACTCCACCATCTAACAGAACTTGTGGTCAGTATAT |
| | GCAAGCCTACATTAAGTCTATTGGTACAGGTTATTTGGCTGATCCATCTGC |
| | TACTAATGAATGCAACTTCTGCAGATTGTCTAAGACCAACGATTACCTGAA |
| | GCAGATCTCATCTTCATATTCTCATAGATGGCGTAACTACGGTATCTTCAT |
| | TTGCTTCATCGTTTTCAACTATGTTGCCGCCGTTTTCTTGTATTGGTTGGC |
| | TAGAGTTCCAAAGAGAGAAGGTAGAGTCTCTAAGAAGAAGCAAGAACACT |
| | GA |
| SEQ ID NO: | MEASEYGGFDHNAENEVKKMAKALVKENSNNRPLDSSSISRVTSGINPVGL |
| 1002 | QETDTGYNAKLDPNSNDFSSEEWTRNLANIVESEPEYYKPHSVGCCWKNLS |
| | AAGDSADLTYQTTFGNLPVKIFSLLYRHIRPSKGSDNFQILKPMDGLVDPGEL |
| | LVVLGRPGSGCTTLLKSISCNTHGFNVGKDSVIKYSGMASKDIRRNLRGEVA |
| | YNAESDTHIPNITVYQTLVTVARLKTPRNRIRGIDRESWAKHIAEVTMATYGLL |
| | HTRNTKVGNDLIRGVSGGERKRVSIAEATICGAKFQCWDNATRGLDSATALE |
| | FVRALRTQAKINNSTACVAIYQCSQHAYDLFDKVCVLYGGYQIYFGPTSNAKK |
| | YFESMGYYCPSRQATADFLTSITSPAERIVNREFLERNIVVPQTPDEMYLYW |
| | QNSPENHELQREIDSRLTQDYKENLTAIKASHNAAQSKRARKSSPYTVSYAM |
| | QVKYLLIRNMWRIINSPGVTLFRVFGNIIMSLVLGSMFYKVQKTTTTNTFYYRG |
| | AAMFYSILVNAFSSLIEIFALFEARPVTEKHKTYALYRPSADAFASFLSDIPGKV |
| | VSTVAFSIIYYFLVNFRRDAGRFFFYLLINLVTTFTMSHLFRCVGSISKTLTEAM |
| | VPASVLLLTLAVYTGFSIPRRSMHEWSKWISYIDPLSYLFESVMTNEFHGRNF |
| | PCAAYIPNGPQYQNTTGTERVCSVVGSKAGHDYVLGDDYLKQSYEYEIKHK |
| | WRGFGVGMAYVVFFFFVYLLICEYNEAAKQKGDLLVFPRSIVKKMRRQGTLQ |
| | KSNSEPEDVEKNATIIANVSPDSSLLLDTLESPSKQKSEIPLNQSDTIFHWRNV |
| | CYDVHIKKESRRILNNVDGWVKPGTLTALMGASGAGKTTLLDCLAKRVTTGVI |
| | TGEIFVNGKLRDESFPRSIGYCQQQDLHLKTATVRESLLFSAMLRQPKKVPLS |
| | EKKQYVEQIIEVLEMVPYADAIVGIEGEGLNVEQRKRLTIGVELVAKPKLLLFL |
| | DEPTSGLDSQTAWSICQLLRKLANRGQAVLCTIHQPSALLIREFDRLLFLQKG |
| | GKTVYFGELGDECKTMIDYFERNGAHKCPPDANPAEWMLEVVGAAPGTHA |
| | SHDYNEVWRNSEEYKEVQQELDRMESELKCVGEEDSSEKHQAFATDIFSQI |
| | LIVSHRFFQQYWRTPQYLWPKFILTAFDEIFIGFTFFKATRSLQGLQNQMLST |
| | FVFCVVYNALLQQFLPVYVEQRNLYEARERPSRTFSWFSFISSQILVEVPWNI |
| | IAGTIAFFVYYYPVGFYANASEANQLHERGALYWLFCTAFFVWIGSMGILANS |
| | FLEHAAEAANVALLCFAFSLAFCGVLVPPKLLPGFWIFMHRVSPLTYYIDSALS |
| | LGIANVDVKCSEIEYVKFTPPSNRTCGQYMQAYIKSIGTGYLADPSATNECNF |
| | CRLSKTNDYLKQISSSYSHRWRNYGIFICFIVFNYVAAVFLYWLARVPKREGR |
| | VSKKKQEH- |
| SEQ ID NO: | ATGTCTACCCCAAAGGATATCGACGTCAACTTGTCTAAATACGATACCGTT |
| 1003 | TTGTCCAACGACTCTCCATCTAATACTTACAACGGTTTCGATGACGAATCC |
| | AGAAAGTTGGTTAGAAACTTGGCTAAGACTCTGACCTCTAACTTCGAATCT |
| | ACTGAATCTTCTGCCTTGTCCTACAATGTTAGAGATACCAACGTTATGATC |
| | ATGAACCCATCTGAACCAGGTTACGATAAGAGATTGGATCCTAACTCTGA |
| | CGAGTTCTCTTCCAAATTGTGGATTCAATACTTGGCCCATTTGTCCTCTAC |
| | TGACCCAGAATATTACAAGCCATTTTCTTTCGGTTGTACCTGGAAGAACTT |
| | GTCTGTTTCTGGTGATTCTGCTGATGTTACTTACCAATCCACCATTTTCAA |
| | CGTCCCATTCAAGATTTTGGGCAAAGTTTACAGAAGGTTCAGACCAGCTA |
| | GAGACTCTAACTCTTTCCAAATTTTGAAGCCAATGGAAGGTTACTTGGACC |
| | CAGGTGAATTATTGGTTGTTTTGGGTAGACCAGGTTCTGGTTGTACTACTT |
| | TGTTGAAAACCATCTCCTCTAACACCCATGGTTTCAGAGTTGATAAGGATT |
| | CCGTTATCTCCTATAACGGTTTGACTCCAAGAGAAATGAGAAAGCACTTTA |
| | GAGGTGAAGTTGTTTACAACGCCGAATCCGATGTTCATTTGCCACATTTG |
| | ACTGTTTTCGAAACCTTATACACCGTCGCTAGATTGAAAACTCCAACTAAT |
| | AGAATCAAGGGTGTTGACAGAGATACCTACGCTAGACATATTACCGATGT |
| | TGCTATTGCTACTTACGGTTTGTCTCATACCAAGAACACTAAGGTTGGTAA |
| | CGCTTTGGTTAGAGGTGTTTCAGGTGGTGAAAGAAAGAGAGTTTCTATTG |
| | CCGAAGTTTCCATTTGCGGTTCTAAGTTTCAATGTTGGGATAACGCTACTA |
| | GAGGTTTGGATTCTGCTAATGCCTTGGAATTCATTAGAGCTTTGGATACC |
| | GAATCCTCTTTGCTAAAAACTGCTGCTGTTGTTGCTATCTACCAATGTTCT |
| | CAAACTGCCTACGATTTGTTCAACAAGGTTTGCGTTTTGAACAAGGGTTAC |
| | CAAATCTACTTCGGTCCAATTGATGAAGCTAAGGGTTACTTTGAATCCATG |
| | GGTTACAAATGCCCAGATAGACAAACTACTGCTGATTTCTTGACCTCTATC |
| | ACCAATCCATCTGAAAGAATCGTTAACCCAGAATTCATCGAAAAGGGTATT |
| | CCAGTTCCACAAACTCCAGACGAAATGTACACTTACTGGAAGTCATCTAG |
| | GGAATACGAAGAGTTGATGAAGAAGATCGACATCAGGTTGTCTGAAAACG |
| | AAGATGTTACCCGTAAGATGATGAAGTCATCACATGTTGCTAGACAGTCC |
| | AAGGGTATTAGATCTGGTTCTCCATATACTGTTAGATACGGCTTGCAAGTC |
| | AGATACTTGTTGACTAGAAACTTCTGGCGTATCCGTAACAACATTTCTGTT |
| | CCATTGGTTATGTTCATCGGCAATTCTTCCATGGCTTTCATTTTGGGTTCT |
| | ATGTTCTTCAAGGCCATGCAACAAGATAACACTACTACCTTTTATTTCAGA |
| | GGTGCTGCTATGTTTTTCGCTATCTTGTTCAACTCTTTCAGCTGCTTGTTG |
| | GAAATCTTCACCTTGTATGAAGCTAGACCAGTTTCCGAAAAACACAGAGC |
| | TTACTCATTATACCATCCTTCCGCTGATGCTTTCGCTTCTATTTTCTCTGAA |
| | TTGCCAAACAAGATCGTCATCTCCGTTGTGTTCAACATCATCTACTACTTC |
| | ATGGTCAACTTTAGAAGAACTGCTGGTGCTTTCTTTTTCTACTGGTTGATT |
| | TCTTTGGTTGGCGTTTTTGCCATGTCTCATTTGTTTAGAACTGTCGGTTCT |
| | TTGACCAAGACTTTGTCTGAAGCTATGGTTCCAGCTTCCATTTTGTTGTTG |
| | TCTATGTCTATGTACGCTGGTTTCGCTATTCCAAAGACTAAGATGTTAGGT |
| | TGGTCTAAGTGGATCTGGTACATTAACCCAATTGCCTACTTGTTCGAATCC |
| | TTGATGGTTAACGAATTCCACGGTAGAGAATTCCAATGCGCTAATTTCATT |
| | CCATCTGGTCCAACTTACTCTAATGCTACTGGTGACGAAAGATCTTGTTCT |
| | ACTTTGGGTGCTATTCCAGGTTCTTCTTATGTATTGGGTGACAACTACTTG |
| | AGACAGTCCTATGATTACTTGTACCAACATAAGTGGCGTGGTTTTGGTATT |
| | GGTTTGGCTTATGCTGTTTTCTTCTTGGTCGTTTACTTGATCGTTTGCGAA |
| | TTCAATGAAGGTGCTAAGCAAAAGGGTGAGATGTTGGTTTTTCCACATGG |
| | TGTTCTGAAGAAATTGAAAAAGAGGGGTGTTTTGTCCGATGATGATAAGA |
| | GAGATTTTGAGAAGGGTTCTTTCGATGCTACCAACCATGATTTGATTAAGG |
| | ACTCTGAATCCACCGACGAATCTTCTACTAATGGTGCTAGACTGTTGAAG |
| | TCTCAAGCTGTTTTTCATTGGAGGAACTTGTGCTACGATATTCCAATCAAA |
| | CACGGTACTAGAAGGTTGTTGGATAATGTTGATGGTTGGGTTAAGCCAGG |
| | TACTTTGACTGCTTTGATGGGTGCTTCTGGTGCTGGTAAAACTACTTTATT |
| | GGATTGCTTGGCTGAAAGGGTTACAATGGGTGTAATTACTGGTGATGTTT |
| | TGGTCGATGGTAGACCAAGAGATGAATCTTTCCCAAGATCTATTGGTTAC |
| | TGCCAACAACAAGACTTGCACTTGAAAACTTCTACCGTCAGAGAATCTTTG |
| | AGATTCTCAGCCTATTTGAGACAACCAGCTGAAGTTTCTGTTGAAGAAAA |
| | GGATGCTTACGTCGAAGAGGTCATTAAGATATTGGAGATGGAAAAGTACG |
| | CTGATGCAGTTGTTGGTGTTGCTGGTGAAGGTTTGAATGTCGAACAAAGA |
| | AAAAGATTGACCATCGGTGTTGAATTGGCTGCTAAACCTAAGTTGTTAGTT |
| | TTCTTGGACGAACCTACTTCTGGTTTGGATAGTCAAACTGCTTGGTCTATC |
| | TGTCAGTTGATGAGAAAATTGGCATCACATGGTCAAGCTATTTTGTGCACT |
| | ATTCATCAACCATCCGCCATCTTGATGCAAGAATTTGATAGATTGCTGTTC |
| | TTGCAGGATGGTGGTCAAACAACTTACTTTGGTGAATTAGGTGATGGTTG |
| | CTGCACTATGATTGACTACTTTGAAAGAAACGGTGCTCATAAGTGTCCAAT |
| | TGGTGCTAATCCAGCTGAATGGATGTTGGAAGTTGTCGGTGCTGCTCCAG |
| | GTTCACAAGCTACTCAAGATTACTTTAAGATCTGGCGTAACTCCGAAGAAT |
| | TCAAGGCTGTTCACAAAGAATTGGACAGCTTGGAAAAAGAGTCTAACTTA |
| | AGACCAGAAGGTATCACTACTGATCATGCTGAATTCGCTACTTCCATTCCA |
| | TACCAAATCAGATTGGTTTCTGCTAGGTTGTTCCAACAGTACATTAGGGCT |
| | CCAGAATACTTGTGGTCTAAATTTGGTTTGACCATTGTCGACGAGTTGTTC |
| | ATTGGTTTCACTTTCTTTAAGGCCGGTACTAGCTTGCAAGGTCTACAAAAT |
| | CAAATGTTGGCTGCTTTCATGTTCACCGTTGTTTTTAACCCACTGTTGCAG |
| | CAATACTTGCCATCTTTCGTTCAACAACGTGACTTATACGAAGCTAGAGAA |
| | AGACCATCTAGAACCTTTTCATGGAAGGCTTTCATCGTTTCCCAAATCTTG |
| | GTTGAAGCTCCATGTAATTTCTTGGCTGGTACTTTGGCTTACTTCATCTAT |
| | TACTACCCAATCGGTTTCTACGAAAACGCTTCTTTTGCTGGTCAATTGCAC |
| | GAAAGAGGTGCTTTGTTTTGGTTGTTCTCTACAGGCTTTTACGTTTTCGTT |
| | GGTTCTATGGGTTTCCTGACTGTCTCTTTTAATGAAGTTGCTCAAAATGCT |
| | GCCGGTATTGCTTCTTTGATGTTCGTTATGTGTACTACCTTCTGTGGTGTT |
| | TTGGCTACTCCAGAAGTTATGCCAGGTTTTTGGATTTTCATGTACAGATTG |
| | TCTCCCTTGACCTACTTCGTTCAAGGTTTCTTAGCTACAGGTTTGGCTAAC |
| | GCTAAAATCCAGTGTTCGGAGAAAGAGTTCATTGTCTTTTCTCCACCATCT |
| | GGTATGAATTGTGGTCAGTACATGGAACAGTACATCACTAATACTGGTAC |
| | TGGCTACTTGGAAGATTCTGAATCTACATCTACCTGCGAATTCTGCCAATT |
| | CTCTTACACTAATGACTTTTTGGCCTCCGTCAACTCCTTTTATTCTCAACG |
| | TTGGAGGAATTGGGGTATCTTCATTTGTTACATTGCCTTCAATTATATGGC |
| | CGGCATTTTCTTGTATTGGTTGGCAAGAGTTCCAAAGAAGTCCTCTGGTTT |
| | GAAAAGAAAGATCCGTAAGAACGAGCTGTCCTGA |
| SEQ ID NO: | MSTPKDIDVNLSKYDTVLSNDSPSNTYNGFDDESRKLVRNLAKTLTSNFEST |
| 1004 | ESSALSYNVRDTNVMIMNPSEPGYDKRLDPNSDEFSSKLWIQYLAHLSSTDP |
| | EYYKPFSFGCTWKNLSVSGDSADVTYQSTIFNVPFKILGKVYRRFRPARDSN |
| | SFQILKPMEGYLDPGELLVVLGRPGSGCTTLLKTISSNTHGFRVDKDSVISYN |
| | GLTPREMRKHFRGEVVYNAESDVHLPHLTVFETLYTVARLKTPTNRIKGVDR |
| | DTYARHITDVAIATYGLSHTKNTKVGNALVRGVSGGERKRVSIAEVSICGSKF |
| | QCWDNATRGLDSANALEFIRALDTESSLLKTAAVVAIYQCSQTAYDLFNKVC |
| | VLNKGYQIYFGPIDEAKGYFESMGYKCPDRQTTADFLTSITNPSERIVNPEFIE |
| | KGIPVPQTPDEMYTYWKSSREYEELMKKIDIRLSENEDVTRKMMKSSHVARQ |
| | SKGIRSGSPYTVRYGLQVRYLLTRNFWRIRNNISVPLVMFIGNSSMAFILGSM |
| | FFKAMQQDNTTTFYFRGAAMFFAILFNSFSCLLEIFTLYEARPVSEKHRAYSL |
| | YHPSADAFASIFSELPNKIVISVVFNIIYYFMVNFRRTAGAFFFYWLISLVGVFA |
| | MSHLFRTVGSLTKTLSEAMVPASILLLSMSMYAGFAIPKTKMLGWSKWIWYIN |
| | PIAYLFESLMVNEFHGREFQCANFIPSGPTYSNATGDERSCSTLGAIPGSSYV |
| | LGDNYLRQSYDYLYQHKWRGFGIGLAYAVFFLVVYLIVCEFNEGAKQKGEML |
| | VFPHGVLKKLKKRGVLSDDDKRDFEKGSFDATNHDLIKDSESTDESSTNGAR |
| | LLKSQAVFHWRNLCYDIPIKHGTRRLLDNVDGWVKPGTLTALMGASGAGKTT |
| | LLDCLAERVTMGVITGDVLVDGRPRDESFPRSIGYCQQQDLHLKTSTVRESL |
| | RFSAYLRQPAEVSVEEKDAYVEEVIKILEMEKYADAVVGVAGEGLNVEQRKR |
| | LTIGVELAAKPKLLVFLDEPTSGLDSQTAWSICQLMRKLASHGQAILCTIHQPS |
| | AILMQEFDRLLFLQDGGQTTYFGELGDGCCTMIDYFERNGAHKCPIGANPAE |
| | WMLEVVGAAPGSQATQDYFKIWRNSEEFKAVHKELDSLEKESNLRPEGITTD |
| | HAEFATSIPYQIRLVSARLFQQYIRAPEYLWSKFGLTIVDELFIGFTFFKAGTSL |
| | QGLQNQMLAAFMFTVVFNPLLQQYLPSFVQQRDLYEARERPSRTFSWKAFI |
| | VSQILVEAPCNFLAGTLAYFIYYYPIGFYENASFAGQLHERGALFWLFSTGFY |
| | VFVGSMGFLTVSFNEVAQNAAGIASLMFVMCTTFCGVLATPEVMPGFWIFM |
| | YRLSPLTYFVQGFLATGLANAKIQCSEKEFIVFSPPSGMNCGQYMEQYITNT |
| | GTGYLEDSESTSTCEFCQFSYTNDFLASVNSFYSQRWRNWGIFICYIAFNYM |
| | AGIFLYWLARVPKKSSGLKRKIRKNELS- |
| SEQ ID NO: | ATGGTGTCCTCTGATACCGATTCCATCGTTGTTAAGTCTGATGCTGGTTCT |
| 1005 | GATGTTGCTTCTTACAGAGGTTTTGATGCTACTGCTGATGAACAAGTTCAT |
| | GATTTGGCTAGAAAGTTGACCAACGAATCTGGTCATTTGTCTTTGTTTTTG |
| | GCTGATGGTAAACCTAGACCATCCGTTGTTTCTGATTCTGCTCATTTGGTT |
| | AGAACCTTGTCTACCATGTCTAATGTTCCAGGTGTTTCTACTTTCACCGAA |
| | GGTGAAATTGATTCCAGATTGGACCCAAACTCTGATGATTTCGATTCTAAG |
| | TTGTGGGTCAAGAACTTCCGTAAGTTGATGGATAATGATCCCGATTACTA |
| | CAAGCACACCTCTTTGGGTATTGCTTACAGAAATTTGAGAGCTTCTGGTAT |
| | TGCTGCTGATGCTTCTTATCAACCTACCATTTTGAACTACCCATACAAGGT |
| | TGTTGAGGACTTGTACAACAAGTTCGCTAAAGAAAATCCAGCCAGATTCTT |
| | CGATATCTTGAAACCTATGGATGCCATTATGAAGCCAGGTTCTTTGACTGT |
| | TGTTTTGGGTAGACCAGGTGCTGGTTGTTCTACTTTGTTGAAAACTATTTC |
| | CGCTCAGACCTACGGTTTTAAGATTGCTCCAGAATCCGAAATCTCTTACG |
| | ATGGTTTTACCATGAACGAGATCAACAAACACTACAGAGGTGAAGTTGTTT |
| | ACTCCGCTGAAGTTGATAATCATTTCCCACATTTGACAGTCGGTCAAACTT |
| | TGAATTTTGCTGCTGGTTTGAGAACCCCACAAAACAGAGGTAATGGTATC |
| | AACAGAGAAGTTTACGCTAAGCACATGACCGATGTTTACATGGCTACTTAT |
| | GGTTTGTTGCATACCAGAAACACTAAGGTTGGTAACGATTTGGTAAGAGG |
| | TGTTTCAGGTGGTGAAAGAAAGAGAGTTTCTATTGCCGAAGTTTCTTTGTG |
| | TGGTTCTGCTTTACAATGTTGGGATAATGCTACTAGAGGTTTGGACGCTG |
| | CTACAGCTTTGGAATTCATTAGAGCTTTGAAAACTTCCGCCGTTTTGTTGG |
| | ATACAACTCCATTGATTGCTATCTACCAATGCTCTCAAGATGCCTACGATT |
| | TGTTTGATAACGTCATCGTCTTGTACGAAGGTTACCAGATCTATTTTGGTT |
| | TGGGTACTAAGGCCAAGGACTACTTTTTGAGAATGGGTTATGATTGCCCA |
| | CCAAGACAAACTACAGCTGATTTCTTGACTTCTCTGACTAACCCATCTGAA |
| | AGAGTTGCTAAACCAGGTTTCGAAAACAAGGTTCCAAAGACTCCAAAAGA |
| | GTTCTCCGATTATTGGAGAAACTCCCCAGAATTCGTTGAATTGACTGAAG |
| | AAGTTGACGCCTACATCCAAGATCATAAGGTTAACAATGCTACCACCGAA |
| | TTCTTGGAATCTAAGGTTGCTAGACAATCCAATCATACCAGACCAACTTCA |
| | TCTTACACCGTGTCTTATTCCATGCAAATCAAGGCCATTTTGAGAAGAAAT |
| | TGGTGGCGTTTACAAGGTGATCCATCTATTACTCTGTTCTCCGTTATCGCT |
| | AACACCATAATGGGTTTGTTGTTGTCCTCTCTGTTTTACAATTTGCCAGCT |
| | ACTTCTGGCTCTTTCTATTACAGATCTGCTTCTTTGTTCTTCGCCGTCTTG |
| | TTTAATGCTTTCAGCTCTTTGTTGGAAGTCATGGCTTTGTTTGAATCCAGA |
| | CCAATTATCGAGAAGCACAAAAAGTATGCCTTGTACCATCCATCAGCAGA |
| | TGCTATGGCTTCCATTATTTCTGAATTTCCACCAAAGTTGATTACCGCCGT |
| | TGGTTTTAACTTGGTCTTTTACTTCATGGTGAACTTCAGAAGAAACCCAGG |
| | TAGATTCTTCTTCTACTTCCTGGTTAATTTCTTGGCTACCTTGGCTATGTC |
| | CCATATCTTTAGATCTATCGGCTCTTTTTACAAGACCTTGTCTGAAGCTAT |
| | GTCTTTGGCTGCTTTGATTTTGTTGGCTTTGGTTATCTACACCGGTTTCGT |
| | TGTTCCAACTCCATCTATGTTAGGTTGGTCTAGATGGATTAACTACTTGGA |
| | TCCTATTGCCTACGTGTTCGAATCTTTGATGACAAACGAATTCCAAGACAG |
| | GTTGTTCGAATGCTCTGCTTTTATTCCATCTGGTGAAGCTTACTCTAAATA |
| | CCCATCTGCTAACAAGGTCTGTTCCTCTGTTTCTTCAGTTGCTGGTGAAG |
| | ATTTTGTCAACGGTACTAAGTATGTTAACGCTGCTTATGCCTACTACAACA |
| | AGCACAAATGGCGTAATGTTGGTGTTGTTATTGCCTTCGTTGTTTTCTTCT |
| | TGGGTGTTTACTTGGCCATTTGCGAATTGTCTAGAGGTTCATTGCAAAAG |
| | GGTGAAGTCTTGGTTTTCCAATCTTCTACCTTGAGGAAATTGAAAAAGCAA |
| | AACAAGCTGATCAACTCCGACGATCCAGAATCTGCTTTGAATGGTGAAAA |
| | GCAAGCCTCCGTTATAGAAGAAACTGGTTCTACTTCTGAGGACAAAGGTG |
| | GTGCTGCTGTTAAGTTGTCTGCTGGTAAAGATATTTTCCATTGGAGAGAT |
| | GTTTGCTACGAGGTTAACATTAAGACCGAAGTCAGAAAGATCTTGAACCA |
| | TGTTGATGGTTGGGTTAAGCCAGGTACATTAACTGCTTTAATGGGTGCTT |
| | CTGGTGCAGGTAAAACTACCTTGTTGGATGTTTTGGCTAACAGAGTTACT |
| | ATGGGTGTTGTAACCGGTTCTATGTTTGTTAACGGTAGATTGAGAGATGA |
| | CTCCTTCCAAAGATCTACTGGTTACGTTCAACAACAAGACTTGCACTTGCA |
| | AACTGCTACTGTTAGAGAATCCTTGAGATTCTCTGCTTACTTGAGACAACC |
| | AGCTTCTGTTTCTCAAGCTGAAAAGGATGAATACGTCGAAAACGTGATCG |
| | AAATCTTGGAGATGGAAAAGTACGCTGATGCTATAGTTGGTGTTAGTGGT |
| | GAAGGTTTGAACGTTGAACAGAGAAAAAGATTGACCATCGGTGTTGAATT |
| | GGCTGCTAAACCTCAACTGTTGTTGTTCTTGGATGAACCTACATCTGGTTT |
| | GGATTCTCAAACTGCTTGGTCTATTTGCCAGTTGATGAGAAAGTTGGCTG |
| | ATAACGGTCAAGCTATTTTGTGCACTATTCATCAACCATCCGCTATCTTGT |
| | TGCAAGAATTTGACAGATTGCTGTTCTTAGCTAGAGGTGGTAGAACTGTTT |
| | ACTTTGGTGATTTGGGTGAAAACTGTACCACCTTGATTGACTACTTCGAAA |
| | AACATGGTGCTCATCCATGTCCACATGATGCTAATCCAGCTGAATGGATG |
| | TTAGAAGTTATTGGTGCTGCACCAGGTTCTCATGCTAATCAAGATTATCAT |
| | GAAGTCTGGATGAACTCTGCTGAAAGAGCTGCAGTTAGAACTGAATTAGC |
| | TACCATGGAACACGAATTGGTTAAGATCCCAAAAGATGATTCTCCAGACG |
| | CCAGAAAAGAATTTGCTGCTCCATTGTGGTTTCAGTACACTCAAGTTACTA |
| | GAAGGGTTTTCGAACAGTACTTCAGAACTCCAACTTACATTTGGTCCAAG |
| | CTGTTGTTGACTATTATCTCCGCTATTTTCAACGGCTTCTCATTTTTCAAG |
| | GCTGGTTTGTCATTGCAAGGCTTGCAGAATCAAATGTTGGCTATCTTCAT |
| | GTTCCTGATCGTTTTGATGACTTTGACCCAACAATACTTGCCCAACTACGT |
| | TTTTCAAAGGGGTCTATATGAAGCTAGAGAAAGACCATCTAAGACCTTTTC |
| | TTGGTTGGCTTTCATTTTGGCCCAAATTACCGTTGAAATTCCATGGCAGAT |
| | GTTGTGTGGTACTTTGTCATTTTTCTGTTGGTACTACCCAGTCGGTATGTA |
| | CGAAAATGCTGTTGCTACTGATACTGTTCACGAAAGAGGTGCTTTAATCT |
| | GGTTGTATATTGTCGCCTTTTTCGTTTACGCTTCCACTTTGGCTCAATTGT |
| | GTGTTGCAGGTATGGAAATTGCTGATAATGCTGCTAATTTGGCCTCTCTG |
| | ATGTTCACAATGTCCTTGAATTTCTGCGGTATCTTGAAGTACCCATCCGGT |
| | TTTTGGATTTTCATGTACAGAGTTTCCCCATTCACTTACTGGGTTCAAGGT |
| | GTTTTGTCTACTGGTGTTGGTAAATCCAAGGTTACTTGTTCTACCTCCGAA |
| | TACGTTCATTTTCCACCACCATCAGGTATGAATTGTGGTGATTATATGAAG |
| | GACTACATTTCTGCAGCTGGTGGTTACTTATTGGATGAAGATGAGACTTCT |
| | AAGTGCTCTTTCTGTTCTACTGCTTCTACTGATGTCTACTTGGCTTCTGTT |
| | AACTCCTACTATTCTCAGCGTTGGAGAAATTACGGTATCTACATTGCCTTC |
| | ATTTTCATCAACATCTTCGGCACCGTTTTCTTGTATTGGTTGGTTAGAGTT |
| | CCCAAGTCCAAGAATAGAGTTAAGGATGAAGCTCCATCAGCTGAAGAAGA |
| | GGAACAAAAGACTATCGAAAGACAGTTGTCTAGAACCCAATCCAGAAACT |
| | CCAAAAAGTCCAGAAAGTCGATCATCTAA |
| SEQ ID NO: | MVSSDTDSIVVKSDAGSDVASYRGFDATADEQVHDLARKLTNESGHLSLFLA |
| 1006 | DGKPRPSVVSDSAHLVRTLSTMSNVPGVSTFTEGEIDSRLDPNSDDFDSKL |
| | WVKNFRKLMDNDPDYYKHTSLGIAYRNLRASGIAADASYQPTILNYPYKVVE |
| | DLYNKFAKENPARFFDILKPMDAIMKPGSLTVVLGRPGAGCSTLLKTISAQTY |
| | GFKIAPESEISYDGFTMNEINKHYRGEVVYSAEVDNHFPHLTVGQTLNFAAGL |
| | RTPQNRGNGINREVYAKHMTDVYMATYGLLHTRNTKVGNDLVRGVSGGER |
| | KRVSIAEVSLCGSALQCWDNATRGLDAATALEFIRALKTSAVLLDTTPLIAIYQ |
| | CSQDAYDLFDNVIVLYEGYQIYFGLGTKAKDYFLRMGYDCPPRQTTADFLTS |
| | LTNPSERVAKPGFENKVPKTPKEFSDYWRNSPEFVELTEEVDAYIQDHKVNN |
| | ATTEFLESKVARQSNHTRPTSSYTVSYSMQIKAILRRNWWRLQGDPSITLFS |
| | VIANTIMGLLLSSLFYNLPATSGSFYYRSASLFFAVLFNAFSSLLEVMALFESR |
| | PIIEKHKKYALYHPSADAMASIISEFPPKLITAVGFNLVFYFMVNFRRNPGRFF |
| | FYFLVNFLATLAMSHIFRSIGSFYKTLSEAMSLAALILLALVIYTGFVVPTPSML |
| | GWSRWINYLDPIAYVFESLMTNEFQDRLFECSAFIPSGEAYSKYPSANKVCS |
| | SVSSVAGEDFVNGTKYVNAAYAYYNKHKWRNVGVVIAFVVFFLGVYLAICEL |
| | SRGSLQKGEVLVFQSSTLRKLKKQNKLINSDDPESALNGEKQASVIEETGST |
| | SEDKGGAAVKLSAGKDIFHWRDVCYEVNIKTEVRKILNHVDGWVKPGTLTAL |
| | MGASGAGKTTLLDVLANRVTMGVVTGSMFVNGRLRDDSFQRSTGYVQQQD |
| | LHLQTATVRESLRFSAYLRQPASVSQAEKDEYVENVIEILEMEKYADAIVGVS |
| | GEGLNVEQRKRLTIGVELAAKPQLLLFLDEPTSGLDSQTAWSICQLMRKLAD |
| | NGQAILCTIHQPSAILLQEFDRLLFLARGGRTVYFGDLGENCTTLIDYFEKHGA |
| | HPCPHDANPAEWMLEVIGAAPGSHANQDYHEVWMNSAERAAVRTELATME |
| | HELVKIPKDDSPDARKEFAAPLWFQYTQVTRRVFEQYFRTPTYIWSKLLLTIIS |
| | AIFNGFSFFKAGLSLQGLQNQMLAIFMFLIVLMTLTQQYLPNYVFQRGLYEAR |
| | ERPSKTFSWLAFILAQITVEIPWQMLCGTLSFFCWYYPVGMYENAVATDTVH |
| | ERGALIWLYIVAFFVYASTLAQLCVAGMEIADNAANLASLMFTMSLNFCGILKY |
| | PSGFWIFMYRVSPFTYWVQGVLSTGVGKSKVTCSTSEYVHFPPPSGMNCG |
| | DYMKDYISAAGGYLLDEDETSKCSFCSTASTDVYLASVNSYYSQRWRNYGIY |
| | IAFIFINIFGTVFLYWLVRVPKSKNRVKDEAPSAEEEEQKTIERQLSRTQSRNS |
| | KKSRKSII |
| SEQ ID NO: | ATGACCTCCATCCACGATATTGAAGATGCTAGTGCTGAAGATGTTAACAG |
| 1007 | ATACGATGGTTACACTAACACCGTTGATTCTGCTGTTACTGAATTGGCTAG |
| | ACAAATCACCAACCACTCTCAATCTTCATTTCAAGATGTCCCATACAAATT |
| | GGCTGCTGGTGAATCTGAACAAGATGCTTTGTCTAGAGTTTCCACTATTG |
| | CTCAAGGTGTTAACCCAATGTCTGACATGTCTAATATCGATCCAAGATTGG |
| | ACCCAAACTCCGATGAATTCAATTCTAGATACTGGATCAAGAACTTCAAGG |
| | CCTTAATGGATAAGGATCCAGATCACTACCAAAACTACTCATTGGGTATTG |
| | CCTTCAAGGATTTGAGAGCTTATGGTGATGCTACTGGTGCTGATTATCAA |
| | ACTACTACTTTGAACGCTCCAATGAAGTTCGCTGTTCAATACGCTAAGGAT |
| | ATCTTCTCATCTAAGGCTGCTAAAATGGCCAACAAGTTCGATATTTTGAAG |
| | CCATTGGATGGCATTATCAAGCCAGGTGAAGTTGTTGTTGTTTTGGGTAG |
| | ACCAGGTGCTGGTTGTACTACTTACTTGAAAACTATTGCTGCTAACACCCA |
| | CGGTTTTGATGTTGGTGAAGAATCCGAAATTTCTTACGACGGTTTGACCT |
| | CTTCCGAAATCAAGAAACATTTTAGAGGTGAGGTTGTCTACAACGCCGAA |
| | TCTGATATTCATTTCCCACATTTGACTGTCTGGCAAACTTTGACTACAGCT |
| | GCTAAATTCAGAACCCCAGAAAACAGAATTCCAGGTGTTTCTAGAGAACA |
| | ATACGCTGAAGCTTTGACCAATGTTTACATGGCTACTTATGGTTTGTCTCA |
| | CACTAAGAACACTAAGGTCGGTTCTGAAATAGTTAGAGGTGTTTCAGGTG |
| | GTGAAAGAAAGAGAGTTTCTATTGCCGAAGTTTCTTTGGCTGGTGCTAGA |
| | TTGCAATGTTGGGATAATGCTACTAGAGGTTTGGATTCTGCTACTGCCTT |
| | GGAATTCATTAGAGCTTTGAGAACTCAAGCCGATGTTTTGGATACAACTG |
| | CTTTGATTGCTATCTACCAATGCTCTCAAGATGCCTACGATTTGTTCGATA |
| | AGGTTTCTGTCTTGTACGAAGGTTACCAAATCTTTTTCGGTAAGGCTGATA |
| | AGGCTAAAGAATACTTCGTTAACATGGGTTGGGATTGTCCAGCTAGAGCT |
| | ACTACTGCTGATTTCTTGACTTCTGTTACTTCCCCAAGAGAAAGAGAACCT |
| | AGAGCTGGTTTTGAAAACAAGGTTCCAAAAACTCCAGAAGAGTTCTCTAT |
| | CTATTGGAGGAATTCTCCAGAAAGAGCCGAGTTGTTGAAAGAAGTTGAAA |
| | CTACTTTGGCTCAGAACAACAATTCCGAATTGAAGCAATCTATCTACGATG |
| | CCAAACACTCTAGGCAATCTAAGAGAATGAGATCCTCTTCTCCATTCACC |
| | GTTTCTGTTTTGTTGCAGACTAAGTACTTGTTAGCCAGAGAAGTCTACAGG |
| | ATTAAGAATGATTGGGGTTTCCACTTCTTCTCTATGGGTGCTAATTCTTTG |
| | ATGGCCTTGGTTTTGTCCTCCATCTTTTACAATTTGCCATCTACCACCTCG |
| | TCCTTTTATTACAGAGGTGCTGCTATGTTTTTCGCCTGTTTGTTTAATGGC |
| | TTCTCGTCCTTCTTGGAGATCTTGTCTTTGTTTGAAGCTAGGCCAATTATC |
| | GAAAAGCACAAGCAATATGCCTTGTACCATCCATCTGCTAATGCTTTGGC |
| | TTCCGTTATTTCTCAATTGCCATTCAAAGCTTTCACCGCCTTGTTTTTCAAC |
| | CTGATCTTTTACTTCATGGTCAACTTCAGAAGAAACCCAGGTAGATTCTTC |
| | TTCTACATGTTGGCTAATGTTACTGCTACCTTGACCATGTCTCACTTTTTC |
| | AGATTGATTGGTTCTGCTGCCTCATCATTGCAAGAAGCTGTTGTTCCAGG |
| | TCACATAGTTTTGTTGGGTTTAGCTATGTTCGTTGGTTTCACTTTGCCAGT |
| | CGATTATATGTTAGGTTGGTGTAGATGGATCAACTACATTAACCCATTGGC |
| | CTATTCTTTCGAAGCCTTGATGGCTAACGAATTCCATGATAGAGAATTCGG |
| | TTGTTCAGCTTATTTGCCAGGTGATCCAGCTGATCATCCATCTTGGTCATC |
| | TGATTCTTGGATCTGTAATTCTGTTGGTGCTGTTGCTGGTGAGTATACTGT |
| | TTCTGGTGATAGGTACATTGAGTTGGCTTACTCTTACAAGAACACTCATAA |
| | GTGGCGTAACTTCGGTATTTCCATTGCTTTCATGATCTTTTTCTTGGTGTT |
| | CTACATGGTGTTCTCCGAGTATAATGAATCCGCTAAACAAAAGGGCGAGA |
| | TCCTGTTGTTTCAAAGGTCTAATTTGAAGAAGATTAAGAAAGAAAAGGGC |
| | GCCATCAATGATGTTGAAGCTGGTAATGGTAGAGAAGTTGTTTCCCAAGA |
| | TGAATCCGAAGAACAACAGGTTGATGCTATTCAAGCTGGTACTGATATTTT |
| | CCATTGGAGAGATGTTCACTACACCGTCAAAATCAAATCCGAGTACAGAG |
| | AAATCTTAGGTGGTGTTGACGGTTGGGTTAAGCCAGGTACTTTGACTGCT |
| | TTAATGGGTGCTTCTGGTGCAGGTAAAACAACTTTGTTGGATGTTTTAGCC |
| | TCCAGAGTTACTATGGGTGTTGTTACTGGTAACATGTTCGTTAACGGTAG |
| | ACTGAGAGATTCCTCATTCCAAAGATCTACTGGTTACGTTCAACAACAAGA |
| | CTTGCATTTGTCTACCGCTACTGTTAGAGAAGCCTTAAGATTTTCTGCCTA |
| | CTTGAGACAACCAGCCTCTGTTTCTAAAGCTGAAAAGGATGCTTACGTCG |
| | AAGAATGCATTAAGATCTTGGACATGCAAAAGTACGCTGATGCTATAGTT |
| | GGTGTTGCCGGTGAAGGTTTAAATGTCGAACAAAGAAAAAGGTTGACCAT |
| | CGGTGTTGAATTAGCTGCTAAGCCAAAGTTGCTGTTATTCTTCGATGAAC |
| | CTACATCTGGTTTGGACTCTCAAACTGCTTGGTCTATTTGTCAGTTGATGA |
| | GAAAGTTGGCTAACCACGGTCAAGCTATTTTGTGTACTATTCATCAACCAT |
| | CCGCCATCTTGATGCAAGAATTTGATAGGTTGCTGTTCTTGGCTAGAGGT |
| | GGAAGAACTGTTTATTTCGGTGATTTGGGTAAGAACTGCCAAGTTTTGATC |
| | GACTACTTCGAATCTCATGGTGCTCCAAAATGTCCAGGTGATGCAAATCC |
| | AGCAGAATGGATGTTGCAAGTTATTGGTGCTGCTCCAGGTTCTCATGCTA |
| | ATCAAGATTATCATCAAGTCTGGCTGAACTCCAAAGAAAGACAGGCTGTT |
| | TTAGATGAGTTGGACTCTATGGAAAGAGAGCTAGTTTCAATTCCTTACGAT |
| | GGTGATTCTAAGCACTCTGAATTTGCTGCACCATTTTACGTTCAGTTGTAC |
| | GTTGTTACCGAAAGGGTGTTTCAAGAATTTTGGAGAACCCCATCTTACATT |
| | TGGGCCAAGATGTTCTTGTCCTCTATCTCCTCTTTGTTCATCGGCTTCATT |
| | TTCTTCAAGGCTAAAAACACCATTCAGGGCTTGCAAAATCAGATGTTCGCT |
| | CTGTTTATGTTCCTGGTCGTTTTTAACCCTTTGCTGCAACAGACTTTGCCA |
| | ACCTTTGTTAATCAGAGAAACCTGTACGAAACCAGAGAAAGACCAGCTAA |
| | AACTTTTGCTTGGCAAGCCTTCATTCTGTCCCAAATTATTGCTGAAATCCC |
| | CTGGAATATCTTCGTTGGTACTTTAGGTTTCTTTTGCTTCTATTACCCACC |
| | AGCTTTTTACCAAAATGCCGAACCATATCATGAAGTTAATGCAAGAGGTG |
| | CTTACGCCTGGTTTTTCTCTATTTTGTTCTACGTCTACATCGGTACTATGG |
| | CTCATATGTGTATGGCTCCATTGGATTTGGTTGATTCAGCTGGTAACTTGG |
| | GTTCTTTGTTGTTCACTATGTGCTTGAATTTCTGCGGTGTTTTGGTCACAA |
| | AAGAAGCTATGCCAGGTTTTTGGGTTTTCATGTATAGAGTTTCACCCTTCA |
| | CCTACTACATCGAAGGTTTCTTAACTAACGCTGTTGCCCATAACGATATTG |
| | TCTGTGCTGATAATGAATACCGTGTATTGGTTCCACCAACTGGTGAAACTT |
| | GTGAAGATTACTTGTCCGATTACATTGCCTCACAAGGTACAGGTTATATCT |
| | TAGATCCATCCGCTACAGATTCTTGTTCTTTGTGTCCAATGTCCTCTACCG |
| | ATGATTTCATTGCTTCCCTGAAATTGAACTACGATAACAGATGGCGTGATG |
| | TCGGTATCTTTATCGCTTTCATCTTTTTCAATATGATCATGGCCGTGTTCTT |
| | TTACTGGTTAGCTAGAGTTCCTAAGAAGTCCGATAGAGTTGGTACAGAAC |
| | AACCTAAAGAAGCCGTTAATATGGGTGCACAAATGGAAAACAATGCTATG |
| | AATGCTCACAAGCACGATGATGTTGTTCAAGACGAAAAATTGGACGAAGG |
| | TTCCATTGAAAAGGGTGAGAATTCTGATGTCTCCAGGTAA |
| SEQ ID NO: | MTSIHDIEDASAEDVNRYDGYTNTVDSAVTELARQITNHSQSSFQDVPYKLA |
| 1008 | AGESEQDALSRVSTIAQGVNPMSDMSNIDPRLDPNSDEFNSRYWIKNFKAL |
| | MDKDPDHYQNYSLGIAFKDLRAYGDATGADYQTTTLNAPMKFAVQYAKDIFS |
| | SKAAKMANKFDILKPLDGIIKPGEVVVVLGRPGAGCTTYLKTIAANTHGFDVG |
| | EESEISYDGLTSSEIKKHFRGEVVYNAESDIHFPHLTVWQTLTTAAKFRTPEN |
| | RIPGVSREQYAEALTNVYMATYGLSHTKNTKVGSEIVRGVSGGERKRVSIAE |
| | VSLAGARLQCWDNATRGLDSATALEFIRALRTQADVLDTTALIAIYQCSQDAY |
| | DLFDKVSVLYEGYQIFFGKADKAKEYFVNMGWDCPARATTADFLTSVTSPRE |
| | REPRAGFENKVPKTPEEFSIYWRNSPERAELLKEVETTLAQNNNSELKQSIY |
| | DAKHSRQSKRMRSSSPFTVSVLLQTKYLLAREVYRIKNDWGFHFFSMGANS |
| | LMALVLSSIFYNLPSTTSSFYYRGAAMFFACLFNGFSSFLEILSLFEARPIIEKH |
| | KQYALYHPSANALASVISQLPFKAFTALFFNLIFYFMVNFRRNPGRFFFYMLA |
| | NVTATLTMSHFFRLIGSAASSLQEAVVPGHIVLLGLAMFVGFTLPVDYMLGW |
| | CRWINYINPLAYSFEALMANEFHDREFGCSAYLPGDPADHPSWSSDSWICN |
| | SVGAVAGEYTVSGDRYIELAYSYKNTHKWRNFGISIAFMIFFLVFYMVFSEYN |
| | ESAKQKGEILLFQRSNLKKIKKEKGAINDVEAGNGREVVSQDESEEQQVDAI |
| | QAGTDIFHWRDVHYTVKIKSEYREILGGVDGWVKPGTLTALMGASGAGKTTL |
| | LDVLASRVTMGVVTGNMFVNGRLRDSSFQRSTGYVQQQDLHLSTATVREAL |
| | RFSAYLRQPASVSKAEKDAYVEECIKILDMQKYADAIVGVAGEGLNVEQRKR |
| | LTIGVELAAKPKLLLFFDEPTSGLDSQTAWSICQLMRKLANHGQAILCTIHQPS |
| | AILMQEFDRLLFLARGGRTVYFGDLGKNCQVLIDYFESHGAPKCPGDANPAE |
| | WMLQVIGAAPGSHANQDYHQVWLNSKERQAVLDELDSMERELVSIPYDGD |
| | SKHSEFAAPFYVQLYVVTERVFQEFWRTPSYIWAKMFLSSISSLFIGFIFFKAK |
| | NTIQGLQNQMFALFMFLVVFNPLLQQTLPTFVNQRNLYETRERPAKTFAWQA |
| | FILSQIIAEIPWNIFVGTLGFFCFYYPPAFYQNAEPYHEVNARGAYAWFFSILFY |
| | VYIGTMAHMCMAPLDLVDSAGNLGSLLFTMCLNFCGVLVTKEAMPGFWVFM |
| | YRVSPFTYYIEGFLTNAVAHNDIVCADNEYRVLVPPTGETCEDYLSDYIASQG |
| | TGYILDPSATDSCSLCPMSSTDDFIASLKLNYDNRWRDVGIFIAFIFFNMIMAV |
| | FFYWLARVPKKSDRVGTEQPKEAVNMGAQMENNAMNAHKHDDVVQDEKL |
| | DEGSIEKGENSDVSR- |
| SEQ ID NO: | ATGTCCCTGAACTCCAACTCCATTACCAATAGATCTGTTGTCTCTATGAAC |
| 1009 | CCATCCGAACCTATTTCTGAAACCGTTTCTCAACAAATCTCCGATGCTAAT |
| | GAATCTGCTACTGAAACTGCTTCTTCTAACAATGGTATGTCTGGTTGCGAA |
| | TCTTCCTTGAATAGATACAATGGTTTCGACGAGAACATCCAGAAGAACATT |
| | CATAACTTGGCCATGTACTTCAACAACCTGTCCATGAACTCTAAAGAGTC |
| | GTTCAACAACAACACTACTACTTTGACTTCTCCAACCTCTTCTGATACCTC |
| | CATTAACAACTTGGATACTGTTTCTACTGCTACCACCTCTGCTTCTATTTTC |
| | AGAGTTTACACCAACGGTATCAACCCAATCTTGGATAACAACAAGTTGGA |
| | ACAACAAACTTCTAACGGCACTGAAGTTTCTACCTTGTACAACCCATATAT |
| | CGATCCATCTAACCCACAGTTCAAGTCCAAAAAGTGGATCCAAAACATGG |
| | TCAACTTGATCAACAACGACCAGTCTTACTACAAGCCATATGAATTGGGTT |
| | GTTGCTGGACTGATTTGTGTGCTATGGGTTCTGATACAAACGATATTACTT |
| | ACCAGACCACCGTTTTTAACGCTCCATACAAATACGCTAGGTTGTTCTTCA |
| | ACCACTTGAACAGTAAGAGAAGATCCCAAGCCAAGAAATTCAAGGGTGTT |
| | ACTATCTTGCATAAGATGGATGGTTTGGTTGAATCTGGTGAGTTGTTGGTT |
| | GTTTTGGGTAGACCAGGTTCTGGTTGTACTACTTTATTGAAGTCTTTGACC |
| | GGTAACACCCATGGTTTCAAGATTTCTCAAGATTCCGAAATCACCTACAAC |
| | GGCATTTCTCAAAAGAAGATCAAAAAGAACTACAGGGGTGATGTTGTTTA |
| | CAACGCTGAAAACGATATCCATTTGCCACATTTGACTGTCTACCAAACTTT |
| | GTTGACTGTCGCTAGATTGAAAACCCCACAAAACAGATTCCACAACGTGT |
| | CTAGAGAACAATTCGCTGATCATATTACCCAAGTTGCTATGGCTACTTATG |
| | GTTTGTCTCATACCAGAAACACTAAGGTTGGTAACGATTTGGTTAGAGGT |
| | GTTTCAGGTGGTGAAAGAAAGAGAGTTTCTATTGCCGAAGTTTTCATCTG |
| | CGGTTCTAAGTTTCAATGTTGGGATAATGCTACCAGAGGTTTGGATGCTG |
| | CTACTGCTTTGGAATTTGTTAAGGCCTTGAAAACTCAAGCCTCTATCACTA |
| | ATGTTTCCGCTGCTGTTTCTATCTATCAATGCTCTAAAGATGCCTACGACT |
| | TGTTCGATAAGGTTTGTGTCTTGTACGAAGGTTACCAAATCTACTTCGGTA |
| | CTACTACCAACGCCAAAAAGTACTTCGAAAAGATGGGTTACTACTGCATC |
| | CAAAGACAAACTGTTGCTGATTTCATTACCGGTATCACCAATCCATCCGAA |
| | AGAATCATTAACCGTAACTTCATTAAGGCCAAGAAGTTCGTTCCACAGACT |
| | CCAAAAGAAATGAACGAATACTGGGAGAACAGCAAAGAGTACAAGCACTT |
| | GATTGAAGATATCGAAGAGTATAAGGTCAGGCAAAAGGCTAACGAAAACG |
| | AACAAATTGAGAAGATCAGAGAAGCCCATATTGCCAAGCAATCTAAAAAG |
| | GCTAGACCAGCTTCTCCATACACTGTTTCTTACTTCATGCAGGTCAAGTAC |
| | CTGTTGTTGAGGAATTTTTGGAGGATGAAGAACTCCTCCTCTATTACCTTG |
| | TTTCAAGTTTGTGGTAACACCGCCATGTCTTTGATTTTTGGTTCTATGTTCT |
| | ACAACGTCCTGAAGCCACCATCTACTACTCAATCTTTTTACTATAGAGGTG |
| | CCGCTATGTTCTTCGCTGTTTTGTTTAATGCTTTCAGCTCCTTGTTGGAAA |
| | TCTTCGCTATCTATGAAGCTAGGGAAATTACCGAAAAGCACAGAACCTAC |
| | TCACTGTATCATCCATCTGCTGATGCTTTGGCTTCAATCTTGTCTGAATTG |
| | CCACCAAAGATTATTACCTGCATCTGCTTCAACATCATCTACTATTTCATG |
| | GTGAACTTCAAGAGGAACGGTGGTAATTTCTTCTTCTACCTGTTGATTAAC |
| | TTCACCTCCGTTTTGGCTATGTCCCATTTGTTTAGAACTGTTGGTTCCATG |
| | ACCAAGTCTTTGTCTGAAGCTATGGTTCCAGCTTCCATTTTGTTGTTGGCT |
| | TTGTCTATGTACGTTGGTTTCGCCATTCCAAAGACTAAGTTGTTAGGTTGG |
| | TCTAAGTGGATCTGGTACATCAATCCATTGGCTTACATGTTCGAATCCTTG |
| | ATGGTTAACGAATTCCATAACACCAAGTTCGAATGCGCTACTTATATTCCA |
| | ACTGGTCCAGGTTACGAAAACATCTTGCCAGATCAAAGAGTTTGCTCTGT |
| | TGTTGGTAGTGTTCCAGGTCAAAATTACGTTTTGGGTGATGACTACTTGA |
| | GGGAATCTTACGACTATTACAACAAACATAAGTGGCGTGGTTTCGGTATT |
| | GGTTTGGCTTACGTTATTTTCTTCTTGGGCGTCTACTTGCTGTTTTGCGAA |
| | ATCAATGAAGGTGCTAAGCAAAAGGGTGAGATGTTGATTTTTCCACACGA |
| | TGTCTTGAAAAAGATGCACAAAGAAGGTCAAATCCAGGACTCTTCTTCATT |
| | GGCTATGGATTCCGATTTGGAAAAAGGTAATGGTAACGACTCATCCTTGG |
| | ATGTCAAAAACTCTAGCATCAACAACATTACCGACTCCATTTCTGGTAACA |
| | CTTTGACTGAAAAGCAGCAGTTGAAGGGTACGAATTTGACTTTGGAAGTT |
| | CAGCCAACTACCAACTCCTCTTCTAATTCTTCCGAAAAGGACATTGAAAAC |
| | AACGGCGTTATCTCCAAGTCCGAATCTATTTTTCATTGGAAGAACCTGTGC |
| | TACGACATCAATATTAAGGGTGAAAACAGGCGTATCTTGTCCAATGTTGAT |
| | GGTTGGGTTAAGCCAGGTACTTTAACTGCTTTGATGGGTGCTTCTGGTGC |
| | TGGTAAAACTACTTTGTTGGATTGCTTAGCTGAAAGAACCACTATGGGTAT |
| | AGTTACCGGTGATATGTTCGTTGACGGTAAATTGAGAGATGAATCTTTCC |
| | CAAGATCTATCGGTTACTGTCAACAGCAAGACTTGCATTTGAAAACCTCTA |
| | CCGTTAGAGAATCCCTGAGATTTTCTGCTTATTTGAGACAGCCATACTCC |
| | GTGTCCAGAAAAGAGAAAGAATTATACGTCGAAGAGGTCATCAAGATCCT |
| | GGAAATGGAAAAGTATGCTGAAGCAATAGTTGGTGTTCCTGGTGAAGGTT |
| | TGAATGTCGAACAAAGAAAAAGGTTGACCATCGGTGTTGAATTGGCTGCT |
| | AAGCCAAAGTTGTTGCTATTTTTGGATGAACCTACCTCCGGTTTGGATTCT |
| | CAAACTGCTTGGTCTATCTGTAAGCTGATGAGAAAGTTGGCTAATCATGG |
| | TCAAGCTATCTTGTTCACCATTCATCAACCATCCGCTATTCTGATGCAAGA |
| | ATTTGATAGGTTGCTGTTCCTACAGAAAGGTGGTAAGACTGTTTACTTTGG |
| | TGATTTGGGTAAGAGATGCCAAACCATGATTGATTACTTTGAAGCTAACG |
| | GTGCTGACAAGTGTCCAAAAGAGGCTAATCCAGCTGAATGGATGTTGGAT |
| | GTTGTCGGTGCTGCTCCAGGTTCTATTGCTAATCAAGATTACTACGAAGT |
| | CTGGCGTAATTCCCAAGAGTATAGAGATGTTCAAGAAGAGTTGAACAGGT |
| | TGGAAGAGGAATTTGCTGGTATTGAAAAACCAGTCGGTTCTGAAGAACAC |
| | AACGAATATGCTACACCTTTGCTATTCCAAATCAAGTACGTTGTCTTGAGG |
| | TTGTTCGATCAGTATTGGAGATCACCAACTTACTTGTGGTCCAAGTTTTTC |
| | TTGACCATCTACAACATGCTGTTCATCGGTTTCACTTTCTTCAAGGCTGAT |
| | TTGAGCTTGCAAGGTCTGCAAAATCAAATGCTGTCTTTGTTCATGTTCACC |
| | GTCATTTTCAACCCATTGATGCAACAATACTTGCCAATGTTTGTTCAACAG |
| | AGAGACTTATACGAAGCCAGAGAAAGACCATCTAGAACCTTTTCTTGGAT |
| | CACCTTTATCGTGTCCCAAATCTTGGTTGAAGTTCCCTGGAACTTTTTGTG |
| | TGGTACAATTGCCTACTTCATCTATTACTACTCTGTTGGCTTGTACCATAA |
| | TGCCTCTGTTGCAAATCAATTGCACGAAAGAGGTGCTTTGTTTTGGTTGTT |
| | CTCTTGTGCTTTCTTCGTGTTCATCTCCTCCATGTCCATTTTGGTTATCAG |
| | CTTTAACGAACATGATAGAAACGCTGCTAACTTGGGTTCTTTGATGTTCAC |
| | TATGTCTTTGGCTTTTTGTGGTGTAATGGCTGGTCCAGATATTTTTCCAAG |
| | ATTCTGGATCTTCATGTACAGAGTTTCTCCACTGACCTACTTTATCGATGG |
| | TTTGTTGTCTACAGGTTTGGCTAATGCTGATGTTACTTGTGCTGATTACGA |
| | ATTGGTCAGATTCTCTCCACCATCAGGTATGACTTGTGGTGAGTATATGC |
| | AACCCTATATTTCTATGGCTGGTACTGGTTACTTGACTGATACTGATGCTA |
| | CTGATACCTGTCATTTCTGCAATGTTTCTAAGACCAACGACTTCTTGAAGT |
| | CCGTTTCTTCTAAATACTCTAGAAGGTGGCGTAACTACGGTATCTTCTTGT |
| | GTTTCATCGTCTTTAACTTCGTTGCAGGTATTGGTCTATATTGGTTGGCTA |
| | GAGTTCCAAAACAATTCAGGATCGGTTTGTTTAAGAGGTTCAAGATCGAC |
| | TAA |
| SEQ ID NO: | MSLNSNSITNRSVVSMNPSEPISETVSQQISDANESATETASSNNGMSGCES |
| 1010 | SLNRYNGFDENIQKNIHNLAMYFNNLSMNSKESFNNNTTTLTSPTSSDTSINN |
| | LDTVSTATTSASIFRVYTNGINPILDNNKLEQQTSNGTEVSTLYNPYIDPSNPQ |
| | FKSKKWIQNMVNLINNDQSYYKPYELGCCWTDLCAMGSDTNDITYQTTVFN |
| | APYKYARLFFNHLNSKRRSQAKKFKGVTILHKMDGLVESGELLVVLGRPGSG |
| | CTTLLKSLTGNTHGFKISQDSEITYNGISQKKIKKNYRGDVVYNAENDIHLPHL |
| | TVYQTLLTVARLKTPQNRFHNVSREQFADHITQVAMATYGLSHTRNTKVGND |
| | LVRGVSGGERKRVSIAEVFICGSKFQCWDNATRGLDAATALEFVKALKTQAS |
| | ITNVSAAVSIYQCSKDAYDLFDKVCVLYEGYQIYFGTTTNAKKYFEKMGYYCI |
| | QRQTVADFITGITNPSERIINRNFIKAKKFVPQTPKEMNEYWENSKEYKHLIED |
| | IEEYKVRQKANENEQIEKIREAHIAKQSKKARPASPYTVSYFMQVKYLLLRNF |
| | WRMKNSSSITLFQVCGNTAMSLIFGSMFYNVLKPPSTTQSFYYRGAAMFFAV |
| | LFNAFSSLLEIFAIYEAREITEKHRTYSLYHPSADALASILSELPPKIITCICFNIIY |
| | YFMVNFKRNGGNFFFYLLINFTSVLAMSHLFRTVGSMTKSLSEAMVPASILLL |
| | ALSMYVGFAIPKTKLLGWSKWIWYINPLAYMFESLMVNEFHNTKFECATYIPT |
| | GPGYENILPDQRVCSVVGSVPGQNYVLGDDYLRESYDYYNKHKWRGFGIGL |
| | AYVIFFLGVYLLFCEINEGAKQKGEMLIFPHDVLKKMHKEGQIQDSSSLAMDS |
| | DLEKGNGNDSSLDVKNSSINNITDSISGNTLTEKQQLKGTNLTLEVQPTTNSS |
| | SNSSEKDIENNAVISKSESIFHWKNLCYDINIKGENRRILSNVDGWVKPGTLTA |
| | LMGASGAGKTTLLDCLAERTTMGIVTGDMFVDGKLRDESFPRSIGYCQQQD |
| | LHLKTSTVRESLRFSAYLRQPYSVSRKEKELYVEEVIKILEMEKYAEAIVGVPG |
| | EGLNVEQRKRLTIGVELAAKPKLLLFLDEPTSGLDSQTAWSICKLMRKLANHG |
| | QAILFTIHQPSAILMQEFDRLLFLQKGGKTVYFGDLGKRCQTMIDYFEANGAD |
| | KCPKEANPAEWMLDVVGAAPGSIANQDYYEVWRNSQEYRDVQEELNRLEE |
| | EFAGIEKPVGSEEHNEYATPLLFQIKYVVLRLFDQYWRSPTYLWSKFFLTIYN |
| | MLFIGFTFFKADLSLQGLQNQMLSLFMFTVIFNPLMQQYLPMFVQQRDLYEA |
| | RERPSRTFSWITFIVSQILVEVPWNFLCGTIAYFIYYYSVGLYHNASVANQLHE |
| | RGALFWLFSCAFFVFISSMSILVISFNEHDRNAANLGSLMFTMSLAFCGVMAG |
| | PDIFPRFWIFMYRVSPLTYFIDGLLSTGLANADVTCADYELVRFSPPSGMTCG |
| | EYMQPYISMAGTGYLTDTDATDTCHFCNVSKTNDFLKSVSSKYSRRWRNYG |
| | IFLCFIVFNFVAGIGLYWLARVPKQFRIGLFKRFKID- |
| SEQ ID NO: | ATGGTTGTCGGTTCCGTTGAACAACATCCAGGTGGTTATTCTGACGAAAATGCTTAT |
| 1011 | GGTGGTTTCGATGAAGCTATTAACGGTTCCGTAAAAGAATTGGCCAGATCCTTGATT |
| | GAAGAGAACAAGGATTCTACCAACTCCTTCAGTGAAAGAGAAAACACCGTTGAAAA |
| | CAACACCGGTATTAACCCAGTTGGTTTACAACCATCTGATGCTGAGTACAAACCAGA |
| | ATTGGATCCATCTTCTAACGACTTCTCATCTAAAGCTTGGATTGGTAACTTGGCTAA |
| | GGTTGTTGTTTCTGATCCAGATTACTACAAGCCATACACTGTTGGTTGTGGTTGGAG |
| | AAATTTGTCTGCTTTGGGTGCTTCTGCTGATGTTGCTTATCAAACTACTGTTGATAAC |
| | ATGCCCTGGAAGATTTTGTCTTGGTTGTATAGAATGGCTAGGCCAGCTAAAGAATCT |
| | GATACCTTCGAAATTTTGAAGCCAATGGATGGTTTGGTTAAGCCAGGTGAATTATTG |
| | GTTGTTTTGGGTAGACCAGGTTCAGGTTGTACTACTTTGTTGAAGTCCATTTCCTCTA |
| | ACACCCATGGTTTCAAGATTCCAAAGGATGCTACCATTTCTTACTCAGGTTTGTCCCC |
| | AAAGGATATCATCAATCATTTCAGAGGTGAAGTTGTCTACTGTCCAGAAGCTGATAT |
| | TCATTTGCCACATTTGACTGTGTTCCAAACCTTGTTGACTGTTGCTAGATTGAAAACC |
| | CCAAGAAACAGAATCAGAGGTGTTTCTAGAGAAGCTTGGGCTAGACATGTTACTGA |
| | AGTTACTATGGCTACTTACGGTTTGTCTCATACCAGAAATACCAAGGTTGGTAACGA |
| | ATTGGTTAGAGGTGTTAGTGGTGGTGAAAGAAAGAGAGTTTCTATTGCCGAAGTTA |
| | CCATTTGCGGTTCTAAGTTTCAATGTTGGGATAACGCTACTAGAGGTTTGGATGCTG |
| | CTACTGCTTTGGAATTTGTTAGAGCCTTGAAAACTCAAACCGAAATCGTTCATTCTG |
| | CTGGTTGTGTTGCTATCTACCAATGTTCTCAAGATGCCTACGATTTGTTCGATAAGG |
| | TTTGCGTTTTACACGGTGGTTACCAAATTTTCTTTGGTCCAGCTACTAAGGCCAAGTC |
| | TTACTTTGAAAGAATGGGTTACTACTGCCCATCTAGACAAACTACAGCTGATTTCTT |
| | GACTTCTGTTACTTCTCCAGCCGAAAGAATCATCAACAGAGAATTCACTGAAAAGG |
| | GTATTGCTGTTCCACAAACTGCTGAAGAAATGTCCGATTATTGGAGAAACTCCCCTG |
| | AATACCAAGAATTGATTGCTGAAGTTGACGAAACCATCTCTCAAGATCACGAAAAG |
| | TCCTTGGAAGTCATCCAAGAATCTCATAACGCTAGACAATCTAAGAGAGCTAGAAG |
| | GGCTGAACCATATACTGTTTCTTACTTCATGCAGGTCAAGTACCTGATGATTAGAAA |
| | CTTCTGGCGTATCATCAACTCCTCTTCTATTACCGTTTTCCAGATCATCGGTAACTCT |
| | GTTATGGCTTTGTTGTTGGGTTCTATGTTCTACAAGGTCCTGAAGAAAAGTTCTACC |
| | GGTACTTTTTACTATAGAGGTGCTGCTATGTTCTTCGCCATTTTGTTTAATGCCTTCA |
| | GCTCCTTGTTGGAGATCTTCTCATTATATGAAGCTAGACCAGTTACCGAAAAGCACA |
| | AGACTTACTCATTATACAGACCTTCCGCTGATGCTTTTGCTTCTGTTTTGTCTGAAAT |
| | TCCAGCTAAGGTTTTGACCGCTGTTTGTTTCAATATTGCCTTCTACTTCTTGGTGAAC |
| | TTCAGAAGAGATGCTGGTAGATTCTTCTTCTACTTTCTGATCAACATTATCGCCGTGT |
| | TCGTTATGTCTCATATGTACAGATGTGTTGGCTCTTTGACTAACACTTTGACTGAAGC |
| | TATGGTTCCAGCCTCTATTTTGTTGTTAGCTATGGCAATGTACACCGGTTTTGCTATT |
| | CCAAAGACTAAGATGTTAGGTTGGTCTAAGTGGATTTGGTGGATTAACCCATTGTCC |
| | TACTTGTTCGAATCTTTGATGGGTAATGAATTCCACGACCAAAAGTTCCCATGTACC |
| | ACTTTTGTTCCAAGAGGTGGTGATTACGATCATGTTACAGGTACTGAAAGAGTTTGC |
| | TCTGTTGTTGGTTCAAAAGCTGGTCAAGATTACGTTTTGGGTGACGACTACCTGAAA |
| | GAATCTTATGGCTATTTGATCAAGCACAAGTGGCGTGGTTTTGGTGTTGGTATGGCT |
| | TACTTGATCTTCTTTTTCTTCCTGTACTTGTTCTTGTGCGAAGTTAATGAAGGTGCTA |
| | AGCAAAAGGGTGAGATTTTGGTTTTTCCAAGGTCCATTGTCAGAAAGATGAGAAAG |
| | CAGAACAAGCTGAAAGAAGAAGATAGGGATCCAGAAGATGTTGAAAAGATTGCTG |
| | GTTCTTCTGGTTCTACCGATAAGATGTTGTTGAAGGACTCCTCCGAATCCATTGATG |
| | AAGAAAATGAACCATCTGCCTTAGGTGGTTCTCAAGCTATTTTTCATTGGAGGAACT |
| | TGTGCTACGAAGTCCAAATCAAAGGTGACACTAGAAGGATCTTGAACAATGTTGAT |
| | GGTTGGGTAAAACCTGGTACTTTGACAGCTTTAATGGGTGCATCTGGTGCTGGTAA |
| | AACTACTTTATTGGATTGCTTGGCTGAAAGGGTTACAATGGGTGTCATTACTGGTGA |
| | TATTTTCGTGAACGGTAAGATCAGGGATGAATCTTTCCCAAGATCTATTGGTTACTG |
| | TCAACAACAAGACCTGCATTTGAAAACTGCTACCGTTAGAGAATCGTTGATTTTCTC |
| | AGCTATGTTGAGACAGCCAAAGTCTGTTCCAGTTTCGGAAAAGAAAAAGTATGTTG |
| | ACGACGTCATCCGTATCTTGGAAATGGAACAATATGCTGATGCAGTTGTTGGTGTTC |
| | CAGGTGAAGGTTTGAATGTTGAACAGAGAAAAAGATTGACCATCGGTGTTGAATTG |
| | GTTGCTAAACCTAAGCTGTTGGTCTTTTTGGATGAACCTACTTCCGGTTTAGATTCTC |
| | AAACTGCTTGGTCTATTTGCCAGCTAATGAAGAAATTGTCTAAGCACGGTCAAGCTA |
| | TCTTGTGCACTATTCATCAACCATCCGCTATGCTAATGCAAGAATTTGATCGTTTGCT |
| | GTTCTTGCAGAAAGGTGGTAATACTGTTTACTTCGGTGATTTGGGTAAAGACTGCA |
| | AGACCATGATTGACTACTTTGAATCTAATGGTGCTGATCCATGTCCACCTGATGCTA |
| | ATCCAGCTGAATGGATGTTGGAAGTTGTCGGTGCTGCTCCAGGTACTCATGCTAAT |
| | AGAGATTACCATGAAGCTTGGAGGAATTCTCCAGAATATCAAGCAGTTCAACAAGA |
| | GTTGGACAGGTTGGAAAATGAGTTGCAATCCTTGGATGAAGAGGATGGTGTTGAA |
| | AAACATAAGTCTTTCGCTACCGATGTGTTCACCCAGATTAAGTTTGTTTCCTTCAGAT |
| | TGCAACAACAGTATTGGAGATCACCACAGTATTTGTGGTCCAAGTTCTTCTTGACTG |
| | TTATCTCCGAGTTGTTCATCGGTTTCACTTTCTTTAAGGCTGACAGATCCATGCAAGG |
| | CTTGCAAAATCAAATGTTGGCTGTTTTCATGTTCACCGTTATCTTTAACGCTATCTTG |
| | GAGCAATACTTGCCAAACTATGTAGAACAAAGGGACTTGTACGAAGCTAGAGAAA |
| | GACCATCTAGAACCTTTTCATGGTTCGCTTTCATCGTGTCCCAAATTTTGGTTGAAGC |
| | TCCATGGAATTTCTTGGCTGGTACTATTGCTTACTTTATCTACTACTACCCAATCGGC |
| | TTTTACCAAAATGCTTCAGCTGCTGGTCAATTGCACGAAAGAGGTGCTTTGTTTTTCT |
| | TGTGGTCTACCGCTTTTTATGTTTGGGTTGGTTCTATGGCTTTACTGGCCAATAGCTT |
| | TATTGAACATGATGTTTCTGCTGCCAATTTGGCCAACTTGTGTTTTACTTTGGCTTTG |
| | TCTTTTTGCGGTGTTATGACTACTCCAGATGCTATGCCTCATTTCTGGATTTTCATGT |
| | ACAGAGTCTCTCCCTTGACCTACTTCATTGATGCTGTTTTGGCAGTTGGTATTGCCAA |
| | CGTTGATATTGAATGCTCCAACTACGAATTTGTCCAATTCACTCCACCACAAGGTAG |
| | AACATGTGGTGAGTATATGCAAGCCTACTTGAAATCTGCTGGTACAGGTTATTTGAA |
| | GGATGCAAATGCTACAGCTCAATGTTTGTTGTGTCCTTTGTCCAGAACTAACGACTA |
| | CTTGTCTCAAGTTAACTCCCATTATTCTCACAGATGGCGTAACTACGGTATTTTCATC |
| | TGTTACATCGTGTTCAACTATGTTGCTGCCGTTTTCTTGTATTGGTTGGCTAGAGTTC |
| | CAAAGAAGGACACCTTTTTCAGCAAGATCTTCAGTAAGAAGTAA |
| SEQ ID NO: | MVVGSVEQHPGGYSDENAYGGFDEAINGSVKELARSLIEENKDSTNSFSERENTVENN |
| 1012 | TGINPVGLQPSDAEYKPELDPSSNDFSSKAWIGNLAKVVVSDPDYYKPYTVGCGWRNL |
| | SALGASADVAYQTTVDNMPWKILSWLYRMARPAKESDTFEILKPMDGLVKPGELLVVL |
| | GRPGSGCTTLLKSISSNTHGFKIPKDATISYSGLSPKDIINHFRGEVVYCPEADIHLPHLTVF |
| | QTLLTVARLKTPRNRIRGVSREAWARHVTEVTMATYGLSHTRNTKVGNELVRGVSGGE |
| | RKRVSIAEVTICGSKFQCWDNATRGLDAATALEFVRALKTQTEIVHSAGCVAIYQCSQD |
| | AYDLFDKVCVLHGGYQIFFGPATKAKSYFERMGYYCPSRQTTADFLTSVTSPAERIINRE |
| | FTEKGIAVPQTAEEMSDYWRNSPEYQELIAEVDETISQDHEKSLEVIQESHNARQSKRA |
| | RRAEPYTVSYFMQVKYLMIRNFWRIINSSSITVFQIIGNSVMALLLGSMFYKVLKKSSTG |
| | TFYYRGAAMFFAILFNAFSSLLEIFSLYEARPVTEKHKTYSLYRPSADAFASVLSEIPAKVLT |
| | AVCFNIAFYFLVNFRRDAGRFFFYFLINIIAVFVMSHMYRCVGSLTNTLTEAMVPASILLL |
| | AMAMYTGFAIPKTKMLGWSKWIWWINPLSYLFESLMGNEFHDQKFPCTTFVPRGGD |
| | YDHVTGTERVCSVVGSKAGQDYVLGDDYLKESYGYLIKHKWRGFGVGMAYLIFFFFLYL |
| | FLCEVNEGAKQKGEILVFPRSIVRKMRKQNKLKEEDRDPEDVEKIAGSSGSTDKMLLKD |
| | SSESIDEENEPSALGGSQAIFHWRNLCYEVQIKGDTRRILNNVDGWVKPGTLTALMGA |
| | SGAGKTTLLDCLAERVTMGVITGDIFVNGKIRDESFPRSIGYCQQQDLHLKTATVRESLIF |
| | SAMLRQPKSVPVSEKKKYVDDVIRILEMEQYADAVVGVPGEGLNVEQRKRLTIGVELVA |
| | KPKLLVFLDEPTSGLDSQTAWSICQLMKKLSKHGQAILCTIHQPSAMLMQEFDRLLFLQ |
| | KGGNTVYFGDLGKDCKTMIDYFESNGADPCPPDANPAEWMLEVVGAAPGTHANRDY |
| | HEAWRNSPEYQAVQQELDRLENELQSLDEEDGVEKHKSFATDVFTQIKFVSFRLQQQY |
| | WRSPQYLWSKFFLTVISELFIGFTFFKADRSMQGLQNQMLAVFMFTVIFNAILEQYLPN |
| | YVEQRDLYEARERPSRTFSWFAFIVSQILVEAPWNFLAGTIAYFIYYYPIGFYQNASAAG |
| | QLHERGALFFLWSTAFYVWVGSMALLANSFIEHDVSAANLANLCFTLALSFCGVMTTP |
| | DAMPHFWIFMYRVSPLTYFIDAVLAVGIANVDIECSNYEFVQFTPPQGRTCGEYMQAY |
| | LKSAGTGYLKDANATAQCLLCPLSRTNDYLSQVNSHYSHRWRNYGIFICYIVFNYVAAVF |
| | LYWLARVPKKDTFFSKIFSKK |
| SEQ ID NO: | ATGTCCGAGTCCTCCATTCAAAACTTCACTACTGATTTCGCTAACGAAGAG |
| 1013 | GATTCTTACAATGGTGATCCAGATGTTTCCTCCGTTAGAGATTTGGCTAGA |
| | TCTTTCACCAATATCAGCCTGAACTCTTCCTCCTTGTATGATATTCCATTG |
| | AAGAACGAGGATGGCAACTTGGATATTGAGGATTCTAAGTACAACTCCAA |
| | GTTGGACCCAAATTCTCCAGATTTTAATGCCCATTTCTGGATGAAGAACCT |
| | GCACAAGATTAGAAATACCGATCCAGACTACTACAAGTCCACTAATTTGG |
| | GTTTAGTCTACAAGAACTTGTCCTGCGTTGGTGAATCTTCTGATGTTATGT |
| | ACCAAACCACCTTCATCTCCATCTTGCAATATTTTGCTGAAACGCTGTACA |
| | AGAAGTTGAGGCCATCTAAACCAGAAGATATGTTCACCATTTTGAAGCCA |
| | ATGGACGGTATTTTGAAACCAGGTTCTTTGAACGTTGTTTTGGGTAAACCT |
| | GGTTCTGGTTGTACTACTCTGTTGAAAACTATTGCTGCTTCTACCTACGGT |
| | TTCGAAGTTGCTAAAGATTCCTTCATGTCTTACGATGGTTTGGCTCCAAAG |
| | GATATTAACAAACACTACAGAGGTGATGTTGTCTACCAAGCTGAAACCGA |
| | TATTCATTTCCCAAACTTGACTGTGTTCGAAACCTTGAAATCTGTTGCTTT |
| | GTTGACTACTCCACGTAACAGAATCAAAGGTTTGACCAGAGATCAATTCG |
| | CTACTCATATGGCTGAAGCTACTATGGCTATGTATGGTTTGTCTCATACCA |
| | GAAACACTAAGGTCGGTAACGAATTCATTAGAGGTGTTTCAGGTGGTGAG |
| | AGAAAAAGAGTTTCCATCTGCGAAATCTCATTGATCAACGGTAAGATCGTT |
| | TGCTACGACAATTCTTCTAGAGGTTTGGATTCTGCCTCTACCTTGTCTTTC |
| | ATTAAGTGTTTGAAAACCGCCTCCATTGCTAATGATACAACTGCTGTTGTT |
| | GCTATCTACCAATGTTCTCAAGAAGCCTACGATTTGTTCGATAACGTCATC |
| | GTTTTGGATCATGGTTACCAGTTGTATAATGGTCCAGCTCAATTGGCTAAG |
| | CAATACTTTTTGGATATGGGTTATGTTTGCCCAGACAGACAAACTACTGCT |
| | GATTTCTTGACTGCTATCACCTCTCCAAAAGAAAGGATCCAGAACAAAGA |
| | AATGCTGTCCAGAGGTATTAAGATCCCATCTACTCCAGAGGAAATGTACA |
| | ACCATTTCAAGAAGTCCCAAATCTACCAGGACTTGTTGAAGCAAATCGAT |
| | GACTACAACTCTAACATCAACGAAGAGACAAAAGAGAAGTTCATTGCTTCT |
| | CATGCTGCTGCTCAATCTAAAAGAGCTAAACCATCTTCCAGCTACAGATT |
| | GTCTTACGGCTTGCAAATCAAATACTTGTTGCAGAGAAACTTCACCAGGA |
| | TCAAGAACGATATTGGCTTGTCTGTTTTCATCGTCTTGGCCAATTCTTTGA |
| | TGGCTTTGGTTATTGCCTCTATGTTCTACAAGGTCATGTACCATACTGACA |
| | CCTCCACATTTTTCTTTCGTGGTGGTTCTTTGTTTTACGCTATCCTGTTTAA |
| | CTCCTTCAGCTCCTTGTTGGAAGTTATGACATTATACGAAGCCAGGTCCA |
| | TTATCGAGAAGCAAAAGAATTTGGCAATGTACCATCCATCTGCAGAAGCT |
| | ATTGCTTCCATTTTGTCTCAATTGCCCTCTAAGTTGTTGACCAACATCTGT |
| | TTCAACCTGCTGTTTTACTTCCTGGCTAACTTGAGAAGAGAACCAGGACC |
| | ATTCTTTTTCTACCTGTTGTTGAACTTCACCTGTGTCTTGACTATGTCTCAC |
| | TTGTTCAGATTCATTGGTTCTGCTACTAAGTCTTTTCCAGAAGCCATGGTT |
| | CCAGGTTCAGTTGTTTTGTTGGCTTTGACAATGTATGCTGGTTTCGCTATT |
| | CCAAAGACCAAAATGTTAGGTTGGTCTAAGTGGATCTACTGGATTAACCC |
| | ATTGCAGTACGGTTTTGAGTCCTTGATGATCAACGAATTCCACGACAGAA |
| | ACTTCGAATGCTCTCAATATGTTCCAACTGGTGGTGATTACAACTCTGTTT |
| | CTTTGGATTACAAGACCTGTTCAGCTGTTGGTGCTGTTCCAGGTGAAGAT |
| | TTTGTTAACGGTGATCAGTTCCTGAAGTTGTCATATGGTTATTCCCATGGT |
| | CATAAGTGGCGTGGTTTTGGTGTTTTGGTTGGTTTTGCTATCTTCTTCTTC |
| | TCGATCTACTTGTTCTTCACCGAATTCAACGAATCCGCTAAACAAAAGGGT |
| | GAGATTATCTTGTTCCCACAGTCTATCGTTAGGAAGATCAAAAAGCAAAAC |
| | AAGTACATGCAGTCCCATCCAGAAGATTTGGAAAACCCAATTGATTCCAA |
| | GGATAGAGCCAACGAAAAGTCCATCATTGATAACGATGACTCCAGATCTT |
| | CTGCCTACAAATCTAAGGATGAATCCTCCTTGGACTCTGATAACGTTGGTT |
| | TGTCAGAATCAGAAGCTACATTGCATTGGAGAGATTTGTGTTACGACATC |
| | AAGATTAAGGGTGAAACCAGACGTATCTTGAACAAAGTTGATGGTTGGGT |
| | TGCCAAGAGATCTATTACTGCTTTGATGGGTTCTTCTGGTGCTGGTAAAA |
| | CTACTTTGTTGGATTGCTTGGCTTCTAGAGTTACTATGGGTGTTGTTACTG |
| | GTAAGATCTTGGTCAATGGTAAGCAAAGAGATAACAGCTTCCCAAGATCT |
| | ATTGGTTACTGTCAACAACAAGACTTGCATTTGTCTACTGCCACTGTTAGA |
| | GAATCCTTGAGATTTTCTGCTTACTTGAGACAATCCGCTGCCATCTCTAAG |
| | AAAGAAAAGGACGAATACGTTGAGAACGTCATCAAAATCTTGGACATGGA |
| | AAAGTACGCTCATGCAGTTGTTGGTGTTATGGGTGAAGGTTTAAATGTCG |
| | AACAACGTAAGAGATTGACCATCGGTGTTGAATTGGCTGCTAAACCTAAG |
| | CTGTTGATGTTTTTGGATGAACCTACATCTGGTTTGGACTCTCAAACTGCT |
| | TGGTCTATTTGTCAGTTGATGAGAAAGTTGGCCAATCAAGGTCAAGCTATT |
| | TTGTGCACTATTCATCAACCATCCGCCATCTTGATTCAAGAATTTGATAGG |
| | TTGTTGTTCTTGCAGCCAGGTGGTAAGACTGCTTATTTTGGTGACTTAGGT |
| | GATGGTTGTAAGACCATGATTAAGTACTTCGAATCTAAGGGTGCTGAAAA |
| | GTGTCCACCAGATGCTAATCCAGCTGAATGGATGTTGGATATAGTTCAAG |
| | CTAGAGATTACCACGAAGCTTGGAGACAGTCTGATGAATTCAAAGAAGTT |
| | AAGTCCACCTTGGAAGAGATGGAAAGAGAATTGCCAAAGATCCAAATGAC |
| | CGAGGATAAGTATACTCATGCTTCATTCGCTGCATCTTTTTGGTTGCAGTA |
| | CAAGTTGGTTTTCATCAGGGTCATGCAACAAAATTGGAGAACTCCATTTTA |
| | CCTGTGGTCCAAGTTTTTCTTGGTCGTCTACTCCGAAATTTTCATCGGCTT |
| | TACTTTCTTCAAGGCCGATCATACCTTACAAGGTCTGCAAAATCAAATGTT |
| | GGCCGTTTTCATGTTCACCGTCTTGTTTAATCCATACTTGCAACAATACCT |
| | GCCAGTGTTTAAGCAACAAAGAGACTTGTACGAAGCAAGAGAAAGACCAT |
| | CTAGAACCTTTTCTTGGGTTGCTTTCATTACTGCTCAAATGGCTGCTGAAA |
| | TTCCATCTAATTTTGCCTCTGGTTGTTTGGCTTTCTTCTGTTACTTTTACCC |
| | AATCGGTTTCTACCAAAACGCTTCCAATTCTGGTCAATTGTCTGAAAGATC |
| | CGGTCTGTTCTTCTTGTATTCTATTGCCTTCTTCATCTACACCGGTTCTTTC |
| | GCTGTTTTAGTTGCTTCTCCATTTGATGATCCACAAGCTGGTGGTCATATT |
| | TCCTCCATTATTTTCACTATGGCCTTGGCTTTTAACGGTGTTTTTGTCGGT |
| | CCAAACGAAATGCCAGGTTTTTGGAAGTTTATGTACAGGGTTTCTCCAAT |
| | GACCTACTTGGTTGACGGTTTGTTGTCTGTTGGTATTGCTAACAACAACG |
| | CTGAATGCTCTACTTACGAATTCAGATCTATAGTGCCACCAGAAAACATGA |
| | CTTGTGGTGAATATTTGGACCCATACTTGAAAGCTGCTGGTACTGGTTATT |
| | TGTTGGACTCAGGTAATGCTGAAGTCTGTAAGTTGTGTTCCGTTTCTTCTA |
| | CCAACGCTTTCTTGTCATCTGTCTCTTCAAAGTATTCTAGAAGGTGGCGTA |
| | ACTTCGGTATTTTCTTGGCTTACATCGTTTTCGATTACGCCTGTACCATTTT |
| | CGTTTATTGGTTGGCTAGAGTCCCAAAGAAATCCTCTAGAGTCAAAGAAC |
| | AATCCGATGCTTCCGTCGAAAATTCCAAGTCTGATGTTGAATCGAAGAAG |
| | AACTAA |
| SEQ ID NO: | MSESSIQNFTTDFANEEDSYNGDPDVSSVRDLARSFTNISLNSSSLYDIPLKN |
| 1014 | EDGNLDIEDSKYNSKLDPNSPDFNAHFWMKNLHKIRNTDPDYYKSTNLGLVY |
| | KNLSCVGESSDVMYQTTFISILQYFAETLYKKLRPSKPEDMFTILKPMDGILKP |
| | GSLNVVLGKPGSGCTTLLKTIAASTYGFEVAKDSFMSYDGLAPKDINKHYRG |
| | DVVYQAETDIHFPNLTVFETLKSVALLTTPRNRIKGLTRDQFATHMAEATMAM |
| | YGLSHTRNTKVGNEFIRGVSGGERKRVSICEISLINGKIVCYDNSSRGLDSAS |
| | TLSFIKCLKTASIANDTTAVVAIYQCSQEAYDLFDNVIVLDHGYQLYNGPAQLA |
| | KQYFLDMGYVCPDRQTTADFLTAITSPKERIQNKEMLSRGIKIPSTPEEMYNH |
| | FKKSQIYQDLLKQIDDYNSNINEETKEKFIASHAAAQSKRAKPSSSYRLSYGL |
| | QIKYLLQRNFTRIKNDIGLSVFIVLANSLMALVIASMFYKVMYHTDTSTFFFRG |
| | GSLFYAILFNSFSSLLEVMTLYEARSIIEKQKNLAMYHPSAEAIASILSQLPSKL |
| | LTNICFNLLFYFLANLRREPGPFFFYLLLNFTCVLTMSHLFRFIGSATKSFPEA |
| | MVPGSVVLLALTMYAGFAIPKTKMLGWSKWIYWINPLQYGFESLMINEFHDR |
| | NFECSQYVPTGGDYNSVSLDYKTCSAVGAVPGEDFVNGDQFLKLSYGYSH |
| | GHKWRGFGVLVGFAIFFFSIYLFFTEFNESAKQKGEIILFPQSIVRKIKKQNKY |
| | MQSHPEDLENPIDSKDRANEKSIIDNDDSRSSAYKSKDESSLDSDNVGLSES |
| | EATLHWRDLCYDIKIKGETRRILNKVDGWVAKRSITALMGSSGAGKTTLLDCL |
| | ASRVTMGVVTGKILVNGKQRDNSFPRSIGYCQQQDLHLSTATVRESLRFSAY |
| | LRQSAAISKKEKDEYVENVIKILDMEKYAHAVVGVMGEGLNVEQRKRLTIGVE |
| | LAAKPKLLMFLDEPTSGLDSQTAWSICQLMRKLANQGQAILCTIHQPSAILIQE |
| | FDRLLFLQPGGKTAYFGDLGDGCKTMIKYFESKGAEKCPPDANPAEWMLDIV |
| | QARDYHEAWRQSDEFKEVKSTLEEMERELPKIQMTEDKYTHASFAASFWLQ |
| | YKLVFIRVMQQNWRTPFYLWSKFFLVVYSEIFIGFTFFKADHTLQGLQNQMLA |
| | VFMFTVLFNPYLQQYLPVFKQQRDLYEARERPSRTFSWVAFITAQMAAEIPS |
| | NFASGCLAFFCYFYPIGFYQNASNSGQLSERSGLFFLYSIAFFIYTGSFAVLVA |
| | SPFDDPQAGGHISSIIFTMALAFNGVFVGPNEMPGFWKFMYRVSPMTYLVD |
| | GLLSVGIANNNAECSTYEFRSIVPPENMTCGEYLDPYLKAAGTGYLLDSGNA |
| | EVCKLCSVSSTNAFLSSVSSKYSRRWRNFGIFLAYIVFDYACTIFVYWLARVP |
| | KKSSRVKEQSDASVENSKSDVESKKN |
| SEQ ID NO: | ATGTCCTCCTCTACCAACTCCGATGATGAATCTGGTAGATTGCATACTTAC |
| 1015 | ACCGGTATTGATGCTCAAGCTGAAGCTACTATTAAGAACTTGGCTAGAAC |
| | TTTGACCGCTCAGTCTTTGAACTCTATCAACTCTTCTAACAACAACAACGA |
| | GGATTCCACCTCTGTTAACGATCATCAATCCATCTTCTCTAACTTGGAAGG |
| | TATCAACCCAGTTTTGACTAACCCAGAACAATCTGGTTACGACGAAAAATT |
| | GGATCCTACCTCTGATTACTTCTCTTCTACTGCTTGGGTTAAGAATATGGC |
| | CAGATTGGCTAAATCTGATCCAGATTACTACAAGCCATACTCTTTGGGTTG |
| | TGTTTGGAAAGATTTGACTGCTTCTGGTACTTCCTCTGATGTTGAATATCA |
| | AGCTACTGCTTTGAACGCTCCATTGAAAGCTTTGTCTTACTTGTACAGAGA |
| | AGTCAAGCCAGTCAACGAAGAAAACTCCTTCCAAATCTTGAAAGAGATGG |
| | AAGGTTGTATTAACCCAGGTGAGTTGTTGGTTGTTTTGGGTAGACCAGGT |
| | TCTGGTTGTACTACTTTGTTGAAAACCATCTCCACTAACACCCATGGTTTC |
| | CATGTTGGTAAGAACGCTACTATTTCTTACTCTGGTTTCACCCCAAAAGAG |
| | ATCAAAAAGCACTATAGAGGTGAAGTTGTTTACAACGCCGAATCCGATATT |
| | CATTTGCCACATTTGACTGTCTACCAAACCTTGTACACTGTCTCTAGATTG |
| | AAAACTCCACAGAACAGAATCAAGGGTGTTGACAGAGATACTTTCGCTAG |
| | ACATATTACCGAAGTTGCTATGGCTACTTATGGTTTGTCTCATACCAGAGA |
| | TACCAAGGTTGGTAACGATTTGGTTAGAGGTGTTTCTGGTGGTGAAAGAA |
| | AGAGAGTTTCTATTGCCGAAGTCTCTATTTGCGGTTCTAAGTTTCAATGTT |
| | GGGATAATGCTACCAGAGGTTTGGATTCTGCTACAGCTTTGGAATTCATT |
| | AGAGCCTTGAAAACTGATGCTACCACCGTTAATTCTTGTTCTACTGTTGCT |
| | ATCTACCAATGCTCTCAAGATGCTTACGATTTGTTCGATAAGGTTTGCGTT |
| | TTGGACCAAGGTTACCAAATCTATTTTGGTCCAGGTACTAAGGCTAAGGC |
| | TTACTTTGAAAAGATGGGTTACGTTTCCCCAGATAGACAAACTACTGCTGA |
| | TTTCTTGACTGCTGTTACTTCTCCAGCTGAAAGGATCTTGAATCAAGAGTA |
| | CTTGAAGAAGGGTATCTCCATTCCACAAACTCCAGAAGATATGAACACTTA |
| | CTGGAAGAACTCCCAAGATTACAAGGATTTGATGGCCGAAATTGACGAGA |
| | AGTTGAACAACAATGTCGAGGACTCTAGAGAATTGGTCAAAGAAGCTCAT |
| | ATTGCCAAGCAGTCTAATAGATCTAGACCATCTTCACCATACACCGTCAAT |
| | TATTTCTTGCAGATCAAGTACCTGCTGACCAGAAATGTTTGGAGAATCAAA |
| | AACAACCCCTCCGTCAATTTGTTCATGGTTTTTGGTAATTCCTCCATGGCC |
| | TTGATTTTGGGTTCTATGTTTTACAAGGTTATGCTGCACGATTCTACCTCT |
| | ACTTTTTACTTTAGAGGTTCCGCTATGTTCTTCGCCATTTTGTTTAATGCTT |
| | TCTCGTGCTTGTTGGAGATCTTCACATTATATGAAGCCAGACCAATTACCG |
| | AAAAGCACAAGACTTACAGCTTGTATCATCCATCTGCTGATGCTTTCGCCT |
| | CCATTATTTCTGAATTGCCAACAAAAGCTGCTATCGCTGTTTGCTTCAACA |
| | TTATCTTCTATTTCTTGGTCAACTTCAGAAGAAACGGCGGCGATTTCTTTT |
| | TCTACTTGCTGATTAACATCGTTGCCGTTTTCGCTATGTCTCATATGTTTA |
| | GAACTGTTGGTGCTGCTACTAGAACATTGTCTGAAGCTATGTTTCCAGCC |
| | TCCATGTTGTTATTGGCTATGTCTATGTATACCGGTTTCGCTATTCCAAAG |
| | ACCAAAATGTTAGGTTGGTCTGAATGGATTTGGTACTTGAATCCATTGGC |
| | CTACTTGTTCGAATCCTTGATGATTAACGAATTCCACAACAGAGATTTCCC |
| | ATGCGCTCAATATGTTCCACAAGGTCCAGCTTATGTTAATGCTACTGGTAC |
| | TGAAAGAGTCTGCATTTCTTTGGGTGCTGTTCCAGGTGAAGATTTTGTTAA |
| | TGGTGATGCTTACATTAAGGCCAACTATGGTTATGAACATAAGCACAAATG |
| | GCGTGGTTTTGGTGTTGGTATGGCTTTTGCTGTTTTCTTCTTGGGTGCTTA |
| | TTTGGCTGTTTGCGAATTCAATGAAGGTGCTAAACAAAAGGGTGAGATCT |
| | TGGTTTTCCCAAAGTCCATTATCCGTAAGATGAAGAAGAATGGTCAATTGC |
| | CACAAAGAGCAAGACCAGATAAGAGAGAAGAAGATATCGAAAAGGGTACT |
| | ACCGATGAATCTTCCGTTAACGATAGAAAGTTGTTGGAGGACTCCGAAAT |
| | TTCTTCCGACGAAAACAAAGAAGAGTCCATCGGTTTGTCTAAGTCTACCG |
| | CTATTTTTCATTGGAGGAACTTGTGTTACGACGTCCAAATCAAAGACGAAA |
| | CGAGAAGAATCTTGTCCGATGTTGATGGTTGGGTAAAACCAGGTACTTTG |
| | ACAGCTTTGATGGGTGCTTCAGGTGCTGGTAAAACTACATTATTGAACTG |
| | TTTGGCTGAAAGGGTTACCATGGGTACTATTACTGGTGATGTTTTCGTTGA |
| | CGGTAGATTGAGAGATGAATCCTTTCCAAGATCTATCGGTTACTGTCAAC |
| | AACAAGACTTGCATTTGAGAACCTCTACCGTTAGAGAATCTTTGAGATTCT |
| | CTGCCTATTTGAGACAACCATCTGATGTTTCTACCGAAGAAAAGAACGCTT |
| | ACGTCGAAGAAATCATCACTATCTTGGAGATGGATAACTACGCTGATGCT |
| | ATAGTTGGTGTACCTGGTGAAGGTTTGAACGTTGAACAAAGAAAAAGATT |
| | GACCATCGGTGTTGAATTGGCTGCTAAACCTAAGCTATTGGTTTTCTTGG |
| | ATGAACCTACATCTGGTTTGGATAGTCAAACAGCTTGGGCTATTTGTCAGT |
| | TGATGAGAAAATTGGCTTCTCATGGTCAAGCTATTTTGTGCACTATTCATC |
| | AACCATCCGCTATCTTGATGCAAGAATTTGATAGGTTGTTGTTCTTGCAAA |
| | GAGGTGGTAAGACTGTTTACTTCGGTGAATTAGGTCATGGTTGCCAAAAG |
| | ATGATCGACTACTTTGAATCTCATGGTTCTCATAAGTGTCCACCAGAGGCT |
| | AATCCAGCCGAATGGATGTTGGAAGTTGTAGGTGCTGCTCCTGGTTCACA |
| | TGCTAATCAAGATTATTACGAAGTCTGGCGTAACTCCGAACATTTTAAAGC |
| | TGTTCATGAAGAGTTGGACAGGATGGAAAAGGATTTGCCAGGTCAAGCAA |
| | AAGAAGAGGACGATCCAACTGCTCACAAAGAATTTGCTACAGGTATTCCA |
| | TACCAGATCAACTTGGTTTCTGAAAGGTTGTTCCAACAATATTGGAGATCC |
| | CCACAATACTTGTGGTCCAAGTTTATCTTGACGATCTTCAACATGCTGTTC |
| | ATCGGTTTCACTTTCTTCAAGGCTAACACTAGCTTGCAAGGTCTACAAAAC |
| | GAAATGTTGGCCATTTTCATGTTCACCGTTATCTTCAACCCACTGTTGCAG |
| | CAATACTTGCCAAATTTTGTCGAACAGAGAGACTTGTACGAAGCTAGAGA |
| | AAGACCATCCAGAACATTCTCATGGAAGGCTTTTATCGTTTCCCAGATTTT |
| | GGTTGAGGTCTTTTGGAATTTCTTGGCTGGTTCTTTGGCTTACTTCATCTA |
| | CTATTACGCCATTGGTTTTTACCACAATGCATCTGTTGCTGGTCAATTACA |
| | CGAAAGAGGTGCTTTGTTTTGGTTGTTCTCAACTGCCTTTTTCGTTTACTG |
| | TGGTTCTATGGGTACAATGGCCATCTCCTTTATTGAAATTGCTGAAAACGC |
| | TGCCAACATGGCTTCATTGATGTTTACTATGTGTTTGTCCTTCTGCGGTGT |
| | TATGGTTACTAAGGATGCTATGCCAAGATTCTGGATCTTCATGTATAGAGT |
| | TTCTCCCTTGACCTACATGATTGATGCTTTGTTGGCTATTGGTGTCGGTAA |
| | CGTTGATATTGTCTGTACCAAGAATGAATTCGTGGAATTCACTCCAGCTG |
| | CTGGTATGACTTGTGGTGAATATTTGGCTCCATACTTGGCTTATGCTGGTA |
| | CTGGTTATTTGAGAGATAACAACGCTACTGATGTTTGCGGTTTGTGTGAAT |
| | ACTCTAGAACTAACGATTACTTGGCTACCGTTAATGCTGAATATGGTCAAC |
| | GTTGGAGAAACTACGGTATTTTCATCTGCTACATCTTCATTAACTTCGCCG |
| | CTGCTATCCTATTTTACTACTTAGCTAGAGTTCCCAAGAAGCAGAAAAAGT |
| | TGAAAGCCGAATGA |
| SEQ ID NO: | MSSSTNSDDESGRLHTYTGIDAQAEATIKNLARTLTAQSLNSINSSNNNNEDS |
| 1016 | TSVNDHQSIFSNLEGINPVLTNPEQSGYDEKLDPTSDYFSSTAWVKNMARLA |
| | KSDPDYYKPYSLGCVWKDLTASGTSSDVEYQATALNAPLKALSYLYREVKPV |
| | NEENSFQILKEMEGCINPGELLVVLGRPGSGCTTLLKTISTNTHGFHVGKNAT |
| | ISYSGFTPKEIKKHYRGEVVYNAESDIHLPHLTVYQTLYTVSRLKTPQNRIKGV |
| | DRDTFARHITEVAMATYGLSHTRDTKVGNDLVRGVSGGERKRVSIAEVSICG |
| | SKFQCWDNATRGLDSATALEFIRALKTDATTVNSCSTVAIYQCSQDAYDLFD |
| | KVCVLDQGYQIYFGPGTKAKAYFEKMGYVSPDRQTTADFLTAVTSPAERILN |
| | QEYLKKGISIPQTPEDMNTYWKNSQDYKDLMAEIDEKLNNNVEDSRELVKEA |
| | HIAKQSNRSRPSSPYTVNYFLQIKYLLTRNVWRIKNNPSVNLFMVFGNSSMA |
| | LILGSMFYKVMLHDSTSTFYFRGSAMFFAILFNAFSCLLEIFTLYEARPITEKHK |
| | TYSLYHPSADAFASIISELPTKAAIAVCFNIIFYFLVNFRRNGGDFFFYLLINIVA |
| | VFAMSHMFRTVGAATRTLSEAMFPASMLLLAMSMYTGFAIPKTKMLGWSEW |
| | IWYLNPLAYLFESLMINEFHNRDFPCAQYVPQGPAYVNATGTERVCISLGAVP |
| | GEDFVNGDAYIKANYGYEHKHKWRGFGVGMAFAVFFLGAYLAVCEFNEGAK |
| | QKGEILVFPKSIIRKMKKNGQLPQRARPDKREEDIEKGTTDESSVNDRKLLED |
| | SEISSDENKEESIGLSKSTAIFHWRNLCYDVQIKDETRRILSDVDGWVKPGTL |
| | TALMGASGAGKTTLLNCLAERVTMGTITGDVFVDGRLRDESFPRSIGYCQQQ |
| | DLHLRTSTVRESLRFSAYLRQPSDVSTEEKNAYVEEIITILEMDNYADAIVGVP |
| | GEGLNVEQRKRLTIGVELAAKPKLLVFLDEPTSGLDSQTAWAICQLMRKLAS |
| | HGQAILCTIHQPSAILMQEFDRLLFLQRGGKTVYFGELGHGCQKMIDYFESH |
| | GSHKCPPEANPAEWMLEVVGAAPGSHANQDYYEVWRNSEHFKAVHEELDR |
| | MEKDLPGQAKEEDDPTAHKEFATGIPYQINLVSERLFQQYWRSPQYLWSKFI |
| | LTIFNMLFIGFTFFKANTSLQGLQNEMLAIFMFTVIFNPLLQQYLPNFVEQRDL |
| | YEARERPSRTFSWKAFIVSQILVEVFWNFLAGSLAYFIYYYAIGFYHNASVAG |
| | QLHERGALFWLFSTAFFVYCGSMGTMAISFIEIAENAANMASLMFTMCLSFC |
| | GVMVTKDAMPRFWIFMYRVSPLTYMIDALLAIGVGNVDIVCTKNEFVEFTPAA |
| | GMTCGEYLAPYLAYAGTGYLRDNNATDVCGLCEYSRTNDYLATVNAEYGQR |
| | WRNYGIFICYIFINFAAAILFYYLARVPKKQKKLKAE- |
| SEQ ID NO: | ATGTGCTACCACTGCCTGATTTTGTTGTCCAGATTCATCGATTCCCTGATTCCAATCT |
| 1017 | TGTTCTTGTTGGGTTCTTTGACCTTTATCTTGCAAGCTTGGTTGAGATCCAGAAGATC |
| | TTTTCATTCTGCTGTTTACGCTCCATTGAAGCAACATGTTACATCTTATGGTACTACC |
| | CCATCTTTGGAAGAGGATGAAGATGATACTCCATCCTCATCTACTATTGCATCTGAA |
| | GAGTTGTACGATGTCCCATTGAATAGATGGTCTATCTACAACATTACCAGATTGGCT |
| | GGTACTTTGTTGCAATTGGGTATTTCTGCTGGTGTTTTGAGAGCTTTGTTGGTTCAT |
| | GATTACACTTTGGACACTACCGTTGAAGGTTCTTCTTCTAACGTTTTGACTTCCTCTA |
| | TGACCGATTGTGTTTATTGGGGTAGACCAATGTCTACTGAAATGTGGGCTTCTATCT |
| | ACTCCAAGTTTATGTTTTCTTGGGTTGCCCCAATGTTGAAAGAAGGTTATCAAAGAA |
| | CTTTGAACGCCGATGATTTGGTCGAATTGATTCCACAAAACAGAGCTAAGAACGTCT |
| | TGCAAACTTACCAACACTATAGGTCACCATCTTTGTTCTGGGGTGTTATCAGAACTTT |
| | CAAGAAAGAATTGGCCATTCAAGCTTTGTGGTGTGTTTTATGGAATGCTTGTTTGTT |
| | TGGTCCACCAGTGTTTCTGAACAAGATCATTAAGTACATCGAAAACAGACACCCAG |
| | ATCAACCAGTTTCTATGGCTTATGCTTACGTCATCTTGTTGTTCATTACCTCTGCTTCT |
| | CAAGCTTTAGCTTTACAACAAGCCTTGTACATTGGTAGAACTTTGGGTGTTAGAATC |
| | CAAGCCATTATAGTCGGTGAAGTTTTCTCTAAAGCTTTGCGTAAAAGACAGGGTGA |
| | TAGAGAAGAAACTGCTCACGATGATGATAACGACGAAAAGAAAGCTGAATCCAAC |
| | GTCAACAACTTGTTGTCCGTTGATTCCTTGAGAATCTCTGATTTTATGGCCTACTCTT |
| | TCCAGTTGTACGGTTCTGCTATTCAAATGGTTGTTTCAGGTGCCCTGTTGTACAATTT |
| | GTTGGGTACTGCTGCTTTGTGGGGTTTAGGTGTTATGGTTTTGACACAACCAGTTGC |
| | TTTCTTGGTGTCTAAGAGATTCGAAAAGGTTCAAGACCAAGTTATGTCTGCTACCGA |
| | TAACAGAATCAAAAAGGTCAACGAATTGCTGTCCGCCATTAGAATTATCAAGTTTTT |
| | CGCTTGGGAGAAAGAATTCAAAAAGCGTGTTATGGACGCCAGGGAAAAAGAATTG |
| | AAAGTTTTGTTGGCTAGGCTGTACATGCACGTTCATACTGTTAATGTTTGGTTCTTCA |
| | TCCCCATCCTGATTATGATTACTGTTTTCTACGCTTACACCAGGACTAATGATTTGAC |
| | TGCTGCTACTGCTTTTACAGCTTTGGCTTTGTTCAACATTTTGAGATTCGCCTTGGAT |
| | GAGTTGCCAATGTTTATTATGTGGGCATTGCAAGGTAGAGTTTCCGCTAAAAGAGT |
| | CCAAAAGTTTTTGGCCGAAGAAGAAGTTACTTCTCCACAACCTACTGTTATGCATGC |
| | TGATATTGGTTTCGTTGATAATGCTGCTTTCGGTTGGGAAAAAGATAAGGCCATTAT |
| | CAAGGACCTGAACTTGTCTTTTCCAAGGGGTAAGTTGTCTGTTATTTGTGGTCCAAC |
| | TGGTTCTGGTAAAACAACTTTGTTAGCCTCCTTGTTAGGTGAAACTTACTGTATGAG |
| | AGGTGCTGCTCATTTGCCAAGAATAGTTCCAAAATCTAAAGCTCCAGTTGGTGGTGC |
| | TGCTTCTGGTATTGCTTATGTTGCTCAAACTGCTTGGTTGCAGAACAGATCTATTAG |
| | AGACAATATCTTGTTCGGCTTGCCATACGATGCTGAAAGATATGAACAAGTGTTGTA |
| | CATTACTGCCTTGACCAAGGATTTGGAAATCTTCGAATATGGTGACTCCACCGAAAT |
| | TGGTGAAAAAGGTGTTACTTTGTCTGGTGGTCAAAAGCAAAGAATGGCTATTGCTA |
| | GAGCTGTTTACTCTCAAGCCGAAACCATTATTTTGGATGATTGCTTGTCTGCTGTTG |
| | ATGCTCATACTGCTAAACACTTGTACGAACATTGCATCACTGGTAACTTGATGAAGG |
| | ATAGAACCGTTATCTTGGTTACCCATCATGTTGCATTGTGTTTGGATTCTGCTGCATA |
| | TGTTGTTGCTATGAAGGATGGTCAAGTTTTAGGTGCTGGTGATCCATCTACTGTTTT |
| | GAAATCTGGTGCTTTGGGTGAAGAATTAGCTAACACTTACGACGAGGATAGGTCCT |
| | CTAAGAAAGAAAGTGCTGGTGCTACTGATGGTGCTGTTCCATTGGTTCCAGAAACT |
| | GTTGAATTGGATAAGAAAGACGGTACTGGCAAATTGGTAAAAGAAGAAGAGAGAG |
| | CTGAAGGTTGGGTTCCATGGTCAATCTATGAAGCTTATATCTACGCTTCTGGTGGCT |
| | ATATTTTCTGGGCCTTGATTTTGATTGCCTTCTGCTTGAATCAAGGCGTTATTTTCTC |
| | ACAAGACTACTGGATTAAGGTTTGGACATCTGCTTACGAAACTAAGAACCATGATTT |
| | CGGTTTGTTGAACGCTTTGGGTACTAGATCCTCCATCTTATTGAACAGCTTGTCCTTG |
| | TCATCTGTCTCTCCAAGTGAAGAACCTAATCAACAACAAAGGGTTAACGTCATGTAC |
| | TACTTGGGTATCTACACCTTGATTGGTGTCATGGCTTTATTGGCTACTACTGCTAGAT |
| | CTTTGATCGTTTACTACGGTGGTATTAGAGCCTCTAGAAGATTGCACGAAAAGTTGT |
| | TGCATAAGATCTTGAGAGCCAAGGTTAGATTCTTTGATTCTACTCCTTTGGGCAGAA |
| | TCTTGAACAGATTCTCTACTGATATGGAAGCCATCGATCAAGAGGTTTCTCCAATGG |
| | TTGCTTTCGTTTTGTTCTCTATGGTTACCATGTTCTGCGTCTTGATCTTGGTTTCTACA |
| | GTTTTGCCAGCATTCTTGATTCCAGGTACTTTCATTGCTGTCGTGTTCGTTTTTATCG |
| | GCATGTATTATTTGGCCACCTCCAGAGATTTGAAGAGATTGAATTCTGTGTCCAGAT |
| | CTCCAATCTACGTCCAATTTTCTGAAACCTTGAACGGTGTTTCTACCATTAGAGCTTT |
| | TGGTGCTCAACCACGTTTCATCAAAGAAAACCATGAATTGGTCGACAACAACAACA |
| | GACCATTTTTGTGGATGTGGGCTACAAACAGATGGTTGCATAGTAGAATAGAAGTT |
| | TTGGGTTCCGCTGTCTGTTTCTTTACTGGTTTGGTTATTATGATCGCCAGATCCTGGA |
| | TTGATCCAGGTTTGGCTGGTTTGTGTTTGTCTTATGCTTTACAATTCACCGACAACTT |
| | GATTTGGGTTGTCAGAGGTTATGCTCAGAACGAAATGAACATGAACTCTATCGAAC |
| | GTGTGCAAGAGTACATGGACATTGAAGAAGAGGCTCCAGAACATATTCCAGCTACT |
| | TGTCCACCAAAATCTTGGCCAGAAACAGGTGCTGTTAAGGTTGAAGAATTGGAAAT |
| | GAGATACTCCCAAGATTCTCCAGCTGTCTTGCATAGAATTTCTTTCGAAACAAAGCC |
| | CAGAGAAAAGGTTGGTATTGTCGGTAGAACAGGTTCAGGTAAATCTACTTTGGCCT |
| | TGTCTTTGTTCAGGTTCATGGAAGCTAGTCATGGTAGAATTCTGATTGATGGTGTTG |
| | ATATCGCCAACCTTGGTTTGGAAGATTTGAGATCTAGACTGACCATCATTCCACAAG |
| | ATCCAGTTTTGTTTTCCGGTACTTTGAGGTCTAATTTGGATCCATTTGGTCAACATGA |
| | CGATGCAGAATTGTGGGCTGCTTTAAAAAGATCCCACTTGATTGATCAACAGGATG |
| | GTGACGAAGAGAAGAAGATTACCTTAGATTCCGTTGTCTTGGAGAATGGTAACAAT |
| | TGGTCACAAGGTCAGAGACAATTGATTGCTTTGGCTAGAGCTTTGGTTAAGAAGTC |
| | CACTTTGATCATCTTGGATGAAGCTACCTCTTCTGTTGATTTCGATACCGATAGAAA |
| | GATCCAAGAAACCATCAGGTCTGAATTGGTTCACTCTTCTTTGTTGTGCATTGCCCAT |
| | AGAATTAGAACTGTTGCCGATTACGATAGGATTTTGGTTTTGGATCAGGGTAGAGT |
| | CAAAGAGTTTGATACCCCATACAATTTGATCACCAGGCAAGATTCCATCTTCAGACA |
| | AATGTGTCAAAGGTCTGGTGAATTCGAAGAGTTATTGGAAATTGCTTCTGCCAAAC |
| | ATTCTGTCGCTTGA |
| SEQ ID NO: | MCYHCLILLSRFIDSLIPILFLLGSLTFILQAWLRSRRSFHSAVYAPLKQHVTSY |
| 1018 | GTTPSLEEDEDDTPSSSTIASEELYDVPLNRWSIYNITRLAGTLLQLGISAGVL |
| | RALLVHDYTLDTTVEGSSSNVLTSSMTDCVYWGRPMSTEMWASIYSKFMFS |
| | WVAPMLKEGYQRTLNADDLVELIPQNRAKNVLQTYQHYRSPSLFWGVIRTFK |
| | KELAIQALWCVLWNACLFGPPVFLNKIIKYIENRHPDQPVSMAYAYVILLFITSA |
| | SQALALQQALYIGRTLGVRIQAIIVGEVFSKALRKRQGDREETAHDDDNDEKK |
| | AESNVNNLLSVDSLRISDFMAYSFQLYGSAIQMVVSGALLYNLLGTAALWGL |
| | GVMVLTQPVAFLVSKRFEKVQDQVMSATDNRIKKVNELLSAIRIIKFFAWEKE |
| | FKKRVMDAREKELKVLLARLYMHVHTVNVWFFIPILIMITVFYAYTRTNDLTAA |
| | TAFTALALFNILRFALDELPMFIMWALQGRVSAKRVQKFLAEEEVTSPQPTVM |
| | HADIGFVDNAAFGWEKDKAIIKDLNLSFPRGKLSVICGPTGSGKTTLLASLLGE |
| | TYCMRGAAHLPRIVPKSKAPVGGAASGIAYVAQTAWLQNRSIRDNILFGLPY |
| | DAERYEQVLYITALTKDLEIFEYGDSTEIGEKGVTLSGGQKQRMAIARAVYSQ |
| | AETIILDDCLSAVDAHTAKHLYEHCITGNLMKDRTVILVTHHVALCLDSAAYVV |
| | AMKDGQVLGAGDPSTVLKSGALGEELANTYDEDRSSKKESAGATDGAVPLV |
| | PETVELDKKDGTGKLVKEEERAEGWVPWSIYEAYIYASGGYIFWALILIAFCL |
| | NQGVIFSQDYWIKVWTSAYETKNHDFGLLNALGTRSSILLNSLSLSSVSPSEE |
| | PNQQQRVNVMYYLGIYTLIGVMALLATTARSLIVYYGGIRASRRLHEKLLHKIL |
| | RAKVRFFDSTPLGRILNRFSTDMEAIDQEVSPMVAFVLFSMVTMFCVLILVST |
| | VLPAFLIPGTFIAVVFVFIGMYYLATSRDLKRLNSVSRSPIYVQFSETLNGVSTI |
| | RAFGAQPRFIKENHELVDNNNRPFLWMWATNRWLHSRIEVLGSAVCFFTGL |
| | VIMIARSWIDPGLAGLCLSYALQFTDNLIWVVRGYAQNEMNMNSIERVQEYM |
| | DIEEEAPEHIPATCPPKSWPETGAVKVEELEMRYSQDSPAVLHRISFETKPRE |
| | KVGIVGRTGSGKSTLALSLFRFMEASHGRILIDGVDIANLGLEDLRSRLTIIPQD |
| | PVLFSGTLRSNLDPFGQHDDAELWAALKRSHLIDQQDGDEEKKITLDSVVLE |
| | NGNNWSQGQRQLIALARALVKKSTLIILDEATSSVDFDTDRKIQETIRSELVHS |
| | SLLCIAHRIRTVADYDRILVLDQGRVKEFDTPYNLITRQDSIFRQMCQRSGEFE |
| | ELLEIASAKHSVA- |
| SEQ ID NO: | ATGTCCAACCAGGGTGATCATCACTTGAACAATGATTTGGTTGATGACGA |
| 1019 | CATCGAAAGATACCATGGTTTCGATTCTCAAGTCAACGAACAAATTACCAA |
| | CTTGGCTAGACAATTCACCAACGTTTCTGCTCAAGAGGCTGAAAAAGAAG |
| | ATGAAGGCGTTGAAGCTTTGTCTAGAGTTTCTACTGTTGCTGCTGGTGTT |
| | GATTTCATCAACAACGTTGATAACGATCCAAGATTGGACCCAAACAACGA |
| | TCAATTCAATTCCAGATTCTGGATCAAAAACATGAAGGCCTTGGTTGATAA |
| | TGACCCAGATTACTACAAGACCTACTCTTTGGGTATTACCTACAAGGATTT |
| | GAGAGCTTATGGTGTTGCTACTGATGCTGATTACCAAACTACTGTTGTTAA |
| | CGGCTTGATTAAGAACGCTAACAACGCTTTCAGATACCTGACCGAATCTA |
| | AAGAGACTAAGAAGAACAAGTACTTCAACATCTTGAAGCCAATGGATGCC |
| | TTGATTCAACCAGGTGAATTGGTTGTTGTTTTAGGTAGACCAGGTTCTGGT |
| | TGTTCTACTCTGTTGAAAACTATTGCCTCTAACACTCATGGTTTCCACATT |
| | GGTGAAGAATCCGTTATTTCTTACGAAGGCTTGACCCCAAAAGAAATCAA |
| | AGCTCATTATAGAGGTGAGGTTGTTTACAACGCCGAATCCGATATTCATTT |
| | CCCACATTTGACTGTTGGTCAGACTTTGAAAAACGCTGCTAAATTCAGAAC |
| | CCCAAGAAACAGAATTCCAGGTGTTTCTAGAGATCAATACGCTGAATGTA |
| | TGACCGATGTTTACATGGCTACTTATGGTTTGTCTCATACCAAGAACACTA |
| | AGGTCGGTTCAGAATTGGTTAGAGGTGTTTCAGGTGGTGAAAGAAAGAGA |
| | GTTTCAATTGCCGAAGTTTCTTTGGCTGGTGCTAGATTGCAATGTTGGGA |
| | TAATGCTACTAGAGGTTTGGATGCTGCTACTGCTTTGGAATTCATTAGAGC |
| | TTTGAGAACCTCCGCTGATATTTTGGATACAACTGCTTTAGTTGCCATCTA |
| | CCAATGTTCTCAAGATGCCTATGATCTGTTCGATAAGGTTTCTGTCTTGTA |
| | CGAAGGTTACCAAATCTTCTTCGGTAGAGTTGAAGATGCCAAGCAATACT |
| | TTTTGAACATGGGTTATGATTGCCCAGCTAGACAAACTACAGCTGATTTCT |
| | TGACTTCTATTACCTCCGCCTCTGAAAGAATTGCTAGATCTGGTTTTGAAA |
| | ACAAGGTCCCAAAAACTCCAGCTGAATTCGAACAATATTGGAGACAATCT |
| | CCAGAGTACACCCAATTGATTTCCGATATCGATTCCAACTTGATCCAGGC |
| | CAAAGAATCTAACATTGCCCAAGATATTAAGATCGCTCATAACGCTAAGCA |
| | GTCCAAGAGAATGAGACATTCTTCTCCATACACTGTTTCTTTTGCTATGCA |
| | GACCAAGTACCTGTTGATCAGAGAATACCAGAGAATCTACAACGATGTTT |
| | TCGTTACTGCCTTCTCCGTCTTTTTCAACTCTTTGATGTCTCTGGTCCTGT |
| | CCTCTATTTTCTATAACTTGCAACAAAACACCGACAGCTTTTACAAAAGGG |
| | GTGCTGCTATGTTTTTCAGCGTTTTGTTTAACGGTTTCCTGTCCTTCTTGG |
| | AAATCATGACTTTGTTTGAAGCCAGACCAGTTGTTGAAAAGCACAAGCAAT |
| | ATTCGTTGTACCATCCATCAGCTAATGCTTTGGCTTCTGTCATTTCTCAGA |
| | TTCCTTTCAAGTTGGTTACCTCCTTGGCTTTCAACCTGATTTTCTACTTCAT |
| | GGTCCACTTCAGAAGAGAACCAGGTAGATTTTTCTTCTACATGCTGATGA |
| | ACTTGACTGCTACTTTCGCTATGTCCCATTTGTTTAGATTGTGTGGTTCTG |
| | CTGCTTCTTCATTGGCTGAAGCTATAGTTCCAGCTCACTTTTTGTTGTTGG |
| | CTTTGACTATTTTCGTCGGCTTTACCATTCCAGTCAACTATATGTTAGGTT |
| | GGTCCAGATGGATCAACTACTTGGATCCATTAGCTTACGCTTTCGAAGCT |
| | TTGATGGCTAACGAATTTTCTGGTTTGGAATACGCTTGCTCCTCTTATATT |
| | CCAGCTGCTCCAAATGGTATTACTGAAGGTGATACTCATTACGTCTGTAAT |
| | GCTGTTGGTGCTGTTCCAGGTAAATCTTTTGTTTCTGGTACTAGATACTTG |
| | GAGGTTGCCTACAAGTATACCAATTCTCATAAGTGGCGTGACTTCGGTAT |
| | TTTGTTAGGTTTGACTTTATTCCCATTGGGCGTCTACATGTTCTTGTCTGA |
| | GTATAATGAATCCGCCAAGCAAAAGGGTGAAGTCTTGTTGTTTCAAAGGT |
| | CTACCTTGAAGGACATCAAAAAGAACAACAAGGTCATCAACGATATCGAA |
| | GCTGGTGACGAAAAAGATGTTTCCTTGCAAGATGAATCCACAGAAGGTGA |
| | CATTAAGGCTTTAGATGCTGGTAAGGATATCTTCCATTGGAGAGATGTTA |
| | GATACACCGTCCAGATCAAGAAAGAAGAAAGACAAATCTTGTCCGGTGTT |
| | GATGGTTGGGTTAAGCCAGGTACTTTGACTGCTTTAATGGGTGCTTCTGG |
| | TGCTGGTAAAACTACCTTGTTGGATGTTTTGGCTAACAGAGTTACTATGG |
| | GTGTTGTTACTGGTGATATGTTCGTTAACGGTAGATTGAGAGACTCCTCAT |
| | TCCAAAGATCTACTGGTTACGTTCAACAACAGGACTTGCACTTGCAAACT |
| | GCTACTGTTAGAGAAGCCTTGAAGTTTTCTGCTTACTTGAGACAACCTAGA |
| | GATGTCACTAGAGAAGAAAAGGATAACTACGTCGAAGAAGTCATCAAGAT |
| | TTTGGAGATGGAAAAGTACGCTGATGCTGTTGTTGGTGTTGCCGGTGAAG |
| | GTTTGAATGTTGAACAAAGAAAAAGGTTGACCATCGGTGTTGAATTGGCT |
| | GCTAAACCTAAGTTGTTGCTGTTTTTGGATGAACCTACCTCCGGTTTGGAT |
| | TCACAAACTGCTTGGTCTATTTGCCAGTTGATGAGAAAGTTGGCTAATCAT |
| | GGTCAAGCTATTTTGTGCACTATCCATCAACCATCCGCAATTTTGATGCAA |
| | GAATTCGATAGGTTGCTATTCTTAGCTAGAGGTGGTAAGACTGTTTACTTT |
| | GGTGATTTGGGTAAGAACTGCCAAACCTTGATTGATTACTTTGAGAAATAC |
| | GGTGCTCCAAAGTGTCCAGGTGATGCTAATCCAGCAGAATGGATGTTGCA |
| | TGTTATTGGTGCAGCTCCAGGTTCTCATGCTAATCAAGATTATCATGAAGT |
| | CTGGCTGAACTCCACTGAAAGACAAGCTGTTTTAGATGAGTTGGACTACA |
| | TGGAAAGGGAATTAGTTAAGATCCCAGTTGATAACTCCGTGGACAATTAT |
| | GAATTTGCTGCTCCATTCACTACCCAATACGCTATCGTTACCAAAAGAGTG |
| | TTTCAGCAGTATTGGAGAACTCCAATCTACATCTGGTCCAAGTTGTTTTTG |
| | GCTACTGTTCCATCTTTGTTCTTGGGTTTTGCTTTCTTTAAGGCCACCAAT |
| | TCATTGCAGGGTTTCCAAAATCAAATGTTCGCCCTGTTTATGTTCCTGGTC |
| | ACTTTTAATCCTTTGGTCCAACAAATTATCCCAGCCTTTGTTGTTCAGAGG |
| | GACTTATACGAAACTAGAGAAAGACCATCTAAGACCTTTTCTTGGATTGCC |
| | TTCATTTTGTCTCAATTCACTGCTGAATTGCCATGGAATGCATTTGTTGGT |
| | ACTATCGCTTTCTTCGTGTTTTATTACCCAGTCGGTTTTTACAACAACGCC |
| | AAGTATGATCATTTGACCAATGAGAGAGGTGCTTACGCCTGGTTTTTCACT |
| | GTTTTATTCTACGTCTACTCCGGTTCTATGGCTCATTTGTTGATTAGCCCA |
| | ATTCAAATTGCTGATGCAGCAGGTAATTTGGGCTCTTTGTTATTCACTATG |
| | TCCTTGAATTTCTGCGGTGTTTTAGTAGGTCCTACTCAATTTCCAGGTTTC |
| | TGGATTTTCATGTACAGAGTTTCACCATTCACCTACTTCATCGATGGTTTC |
| | TTGTCAAATGCTTTAGCTCATACCACCGTTCAATGTTCAGCTGCAGAATTA |
| | GTAACTATGGAACCTACTGCTGGTTTGACATGTGGTGATTATCTGTCATCT |
| | TACATTGCTGCTGCAGGTACTGGTTATGTAAACAATCCAGATGCTACTTCT |
| | GCTTGCCAATTTTGCTCTGTTTCAACTTCTGATGCCTACCTGAAACTGATC |
| | TCTTTGTCTTACTCTAGAAAGGGTAGAAACATGGGTGTTTTCGTCGCTTAC |
| | ATTTTCATTAACTGGGCCTTAGCTATCTTCTTCTATTGGTTGGCTAGAGTC |
| | CCTAAGAAAAACAATAGAGTCAAGGATGAGAGGGACCCTAACAAGAAAAA |
| | GTCAGAGATCAAAGAATGA |
| SEQ ID NO: | MSNQGDHHLNNDLVDDDIERYHGFDSQVNEQITNLARQFTNVSAQEAEKEDEGVEAL |
| 1020 | SRVSTVAAGVDFINNVDNDPRLDPNNDQFNSRFWIKNMKALVDNDPDYYKTYSLGITY |
| | KDLRAYGVATDADYQTTVVNGLIKNANNAFRYLTESKETKKNKYFNILKPMDALIQPGE |
| | LVVVLGRPGSGCSTLLKTIASNTHGFHIGEESVISYEGLTPKEIKAHYRGEVVYNAESDIHF |
| | PHLTVGQTLKNAAKFRTPRNRIPGVSRDQYAECMTDVYMATYGLSHTKNTKVGSELVR |
| | GVSGGERKRVSIAEVSLAGARLQCWDNATRGLDAATALEFIRALRTSADILDTTALVAIY |
| | QCSQDAYDLFDKVSVLYEGYQIFFGRVEDAKQYFLNMGYDCPARQTTADFLTSITSASE |
| | RIARSGFENKVPKTPAEFEQYWRQSPEYTQLISDIDSNLIQAKESNIAQDIKIAHNAKQSK |
| | RMRHSSPYTVSFAMQTKYLLIREYQRIYNDVFVTAFSVFFNSLMSLVLSSIFYNLQQNTD |
| | SFYKRGAAMFFSVLFNGFLSFLEIMTLFEARPVVEKHKQYSLYHPSANALASVISQIPFKL |
| | VTSLAFNLIFYFMVHFRREPGRFFFYMLMNLTATFAMSHLFRLCGSAASSLAEAIVPAHF |
| | LLLALTIFVGFTIPVNYMLGWSRWINYLDPLAYAFEALMANEFSGLEYACSSYIPAAPNGI |
| | TEGDTHYVCNAVGAVPGKSFVSGTRYLEVAYKYTNSHKWRDFGILLGLTLFPLGVYMFL |
| | SEYNESAKQKGEVLLFQRSTLKDIKKNNKVINDIEAGDEKDVSLQDESTEGDIKALDAGK |
| | DIFHWRDVRYTVQIKKEERQILSGVDGWVKPGTLTALMGASGAGKTTLLDVLANRVT |
| | MGVVTGDMFVNGRLRDSSFQRSTGYVQQQDLHLQTATVREALKFSAYLRQPRDVTRE |
| | EKDNYVEEVIKILEMEKYADAVVGVAGEGLNVEQRKRLTIGVELAAKPKLLLFLDEPTSGL |
| | DSQTAWSICQLMRKLANHGQAILCTIHQPSAILMQEFDRLLFLARGGKTVYFGDLGKN |
| | CQTLIDYFEKYGAPKCPGDANPAEWMLHVIGAAPGSHANQDYHEVWLNSTERQAVL |
| | DELDYMERELVKIPVDNSVDNYEFAAPFTTQYAIVTKRVFQQYWRTPIYIWSKLFLATVP |
| | SLFLGFAFFKATNSLQGFQNQMFALFMFLVTFNPLVQQIIPAFVVQRDLYETRERPSKTF |
| | SWIAFILSQFTAELPWNAFVGTIAFFVFYYPVGFYNNAKYDHLTNERGAYAWFFTVLFY |
| | VYSGSMAHLLISPIQIADAAGNLGSLLFTMSLNFCGVLVGPTQFPGFWIFMYRVSPFTYF |
| | IDGFLSNALAHTTVQCSAAELVTMEPTAGLTCGDYLSSYIAAAGTGYVNNPDATSACQF |
| | CSVSTSDAYLKLISLSYSRKGRNMGVFVAYIFINWALAIFFYWLARVPKKNNRVKDERDP |
| | NKKKSEIKE- |
| SEQ ID NO: | ATGTCCGAATTGGACAAGGACTCCTCTTCTAATGTTTCTTCTGCCTCCGAT |
| 1021 | CATATCTCTTACAATGGTTTTGACGAAAAGGCCGACAAGAGAATTAGACA |
| | ATTGGCTCAACAATTGACCAGAACCTCTACTAATTTGGATACCCAAGATGT |
| | CAACGGTAACAACAACAACGATGTTCAATCTACCGTGTCCAGATCCATTTT |
| | CTCTGACAGTTTGTTGAAAGAAGGTGTCAACCCAGTTTTCACCGATATTAA |
| | CGATCCAAACTACAACGAAAAGCTGGACCCAAATTCTGACAACTTCTCTT |
| | CTTATGATTGGGTCAAGAACATCTCCAATTTGGCTAATGCTGATCCAGATT |
| | ACTACAAGCCATACAAGTTGGGTTGTTCTTGGAAGAATTTGACTGCTGAA |
| | GGTAACTCCTCTGATGTCTCTTATCAATCCACTGTTTTGAACCTGCCATTG |
| | AAGTTGGCTACTTTGGGTTATTACTTGTTGTCATCTGGTGCCAACAAGAAG |
| | GTTCAAATCTTGAAATCTGTTGACGGTTTGATTAAGCCAGGTGAGTTGTTG |
| | GTTGTTTTGGGTAGACCAGGTTCAGGTTGTACTACTTTGTTGAAGTCTATT |
| | ACCTCTAACACCCACGGTTTCCAATTGACTGATGAATCCGAAATTTCCTAC |
| | GATGGTTTGACCCCAAAAGAGATCAAAAAGCACTATAGAGGTGATGTTGT |
| | TTACAACGCTGAAGCCGATATTCATTTGCCACATTTGACTGTTTTCCAAAC |
| | CTTGGTTACTGTCGCTAAGTTGAAAACTCCACAGAATAGATTCAAGGGTG |
| | TCACCAGAGAACAATTCGCTGATCATGTTACTGATGTTACTATGGCTACTT |
| | ACGGTTTGTTGCATACCAGAAATACCAAGGTTGGTAACGATTTGGTTAGA |
| | GGTGTTTCTGGTGGTGAAAGAAAGAGAGTTTCTATTGCCGAAGTTACCAT |
| | TTGCGGTTCTAAGTTTCAATGTTGGGATAACGCTACTAGAGGTTTGGATTC |
| | TGCTACTGCTTTGGAATTCATTAGAGCCTTGAAAACACAAGCCGTCTTGC |
| | AAAACACTGCTGCTACTGTTGCTATCTACCAATGTTCTCAAGATGCCTACG |
| | ATTTGTTCGATAAGGTTTGCGTTTTGGATGAAGGTTACCAGTTGTTTTACG |
| | GCTCATCTTCTAAGGCCAAAGAATTTTTCATCAAGATGGGTTACATTTGCC |
| | CACCAAGACAAACTACTGCTGATTTCTTGACTTCTGTTACCTCTCCAGTTG |
| | AAAGGATCTTGAACGAAGAATACTTGGCTAAGGGTATCAAGATTCCACAA |
| | ACTCCTAGAGACATGAGCGAATATTGGAGAAATTCTCAAGAGTACAGAGA |
| | CTTGATCAGAGAAATCGATGAGTACAACGCTCAAAACAACGACGAATCCA |
| | AGCAAATTATGCATGATGCTCATGTTGCTACCCAATCTAGAAGGGCTAGA |
| | CCATCTTCTCCATATACTGTTTCTTATGGCTTGCAGATCAAGTACATCTTG |
| | ACTAGAAACATCTGGCGTATGAAGAACTCCTTCGAAATTACTGGTTTCCA |
| | GGTTTTTGGTAACTCTGCTATGGCTTTGATTTTGGGCTCTATGTTCTACAA |
| | GGTTATGTTGCATCCAACTACCGATACCTTTTATTACAGAGGTGCTGCTAT |
| | GTTCTTCGCCGTTTTGTTTAATGCCTTCTCATCCTTGATTGAGATCTTCAC |
| | CTTGTATGAAGCTAGACCAATTACCGAAAAGCACAAGTCCTACTCATTATA |
| | CCATCCATCTGCTGATGCTTTCGCCTCCATTATTTCTGAAATTCCTCCAAA |
| | GTTGATCACCTCCGTTTGCTTCAACATTATCTTCTACTTTCTGTGCAACTT |
| | CAGACGTAATGGTGGTGTTTTCTTCTTCTACTACCTGATTTCTATCGTTGC |
| | TGTTTTTGCCATGTCTCACTTGTTTAGATGTGTTGGTTCTTTGACCAAGAC |
| | CTTGCAAGAAGCTATGGTTCCAGCTTCTATGTTGTTATTGGCTTTGTCTAT |
| | GTACACCGGTTTCGCTATTCCTAGAACTAAGATTTTAGGTTGGTCCATCTG |
| | GGTTTGGTACATTAACCCATTGGCTTACTTGTTCGAGTCCTTGATGATTAA |
| | CGAATTCCATGGTAGACATTTCCCATGCACTGCTTATATTCCAGCTGGTG |
| | GTTCTTACGATTCTCAAACTGGTACTACCAGAATCTGTTCTGTTAATGGTG |
| | CTATTGCTGGTCAAGATTACGTTTTGGGTGACGATTACATCAAATCCTCTT |
| | ATGCTTACGAACACAAACATAAGTGGCGTGGTTTTGGTGTTGGTATGGCT |
| | TATGTTGTTTTCTTTTTCGTCGTCTACTTGGTCATTTGCGAGTATAATGAAG |
| | GTGCTAAGCAAAAGGGTGAGATCTTGGTTTTTCCAAGATCCGTTGTTAAG |
| | AAGATGAAGAAAGCTAAGACCCTGAACGACTCTTCTTCAAACGTTTCTGAT |
| | GTTGAAAAGGCCACCTCCGAATCTATTTCTGATAAGAAGTTGCTGGAAGA |
| | GTCCTCTGGTTCTTTTGATGATTCTTCCGAAAGAGAGCACTTCAACATCTC |
| | TAAATCTTCCGCTGTTTTTCACTGGCGTAACTTGTGTTATGATGTCCAAAT |
| | CAAGTCCGAAACCAGACGTATTTTGAACAATGTTGATGGTTGGGTTAAGC |
| | CTGGTACTTTAACTGCTTTGATGGGTTCTTCTGGTGCTGGTAAAACTACTT |
| | TATTGGATTGCTTGGCTGAAAGGGTTACCATGGGTGTTATTACTGGTGAT |
| | ATTTTTGTGGACGGTTTGCCAAGAGATACTTCATTCCCAAGATCTATCGGT |
| | TACTGCCAACAACAAGACTTGCATTTGACTACTGCTACCGTTAGAGAATC |
| | CTTGAGATTTTCTGCTGAATTGAGACAACCAGCCGATGTTTCTGTTTCTGA |
| | AAAACATGCTTACGTCGAAGAGGTCATTAAGATTTTGGAGATGGAAAAGT |
| | ACGCTGATGCTGTTGTTGGTGTTGCTGGTGAAGGTTTGAACGTTGAACAA |
| | AGAAAAAGATTGACCATCGGTGTAGAATTGGCTGCTAAACCTAAGTTGTT |
| | AGTTTTCTTGGATGAACCCACTTCAGGTTTGGACTCTCAAACAGCTTGGT |
| | CTATTTGTCAGCTAATGAAGAAGTTGGCCAAGTTCGGTCAAGCTATTTTGT |
| | GTACTATTCATCAACCATCCGCCATCCTGATGCAAGAATTCGATAGACTGT |
| | TGTTCCTACAGAAAGGTGGTAAGACTGTTTACTTTGGTGAATTGGGTGAT |
| | AACTGCACCACCATGATTGATTACTTTGAAAGAAACGGTGCTCATAAGTGT |
| | CCACCAGATGCTAATCCAGCTGAATGGATGTTGGAAGTTGTCGGTGCTGC |
| | TCCAGGTTCTCATGCTTCACAAGATTACAATGAAGTCTGGCGTAATTCCG |
| | ATGAGTATAGAGCTGTTCAAGAGGAATTGGATTGGATGGAATCTGAATTG |
| | CCAAAACAAGCTACTGAAACTTCTGCCCACGAATTATTGGAATTCGCTTCT |
| | TCTTTGTGGATCCAATATGTTGCTGTCTGCATTAGGTTGTTCCAACAATAT |
| | TGGCGTACCCCATCTTACATTTGGTCTAAGTTTTTGGTCACCATCTTCAAC |
| | GCTTTGTTCATCGGTTTTACTTTCTTCAAGGCTGACAGAACATTGCAGGGT |
| | TTACAAAATCAGATGTTGGCCATTTTCATGTTCACCGTTATTACGAACCCA |
| | ATCTTGCAACAATACTTGCCATCTTTCGTTACTCAGAGAGACTTATACGAA |
| | GCTAGAGAAAGACCATCCAGAACATTCTCTTGGAAGGCTTTTATTGCTGC |
| | CCAAATCTCTGTTGAAATCCCATGGTCAATTTTGGCCGGTACTCTATATTT |
| | CCTGATCTACTATTACGCCATCGGCTTTTACAACAATGCTTCTGCTGCTGA |
| | TCAATTGCACGAAAGAGGTGCTTTGTTTTGGTTATTTTCTTGCGCCTTCTT |
| | CGTCTACATCGTTTCTTTGGGTACTTTGGTCATTGCCTTCAATCAAGTTGC |
| | TGAAACTGCTGCTCATTTGGCTTCATTGATGTTTACCATGTGCTTGTCTTT |
| | CAACGGTGTCTTAGTTACTTCTGCTAAGATGCCAAGATTCTGGATCTTCAT |
| | GTATAGGGTTTCTCCATTCACCTACTTCGTTGATGCTTTATTGTCTACCGG |
| | TGTTGCTAACGTTGAAGTTCATTGTGCTGATTACGAATTGAGAAAGTTCAC |
| | TCCACCATCTGGTTTGACTTGTGGTGAGTACATGGATCCTTATATTTCTGC |
| | TGCAGGTACTGGTTATTTGACTGATCCAAACAATACCGAAACCTGCTCTTT |
| | CTGTCAAATTTCTGACACCAATACTTTCTTGGCCTCTGTTGGTTCATCTTA |
| | TCATAGACGTTGGAGAAACTTCGGTATCTTCATTTGTTTCATTGCCATCAA |
| | CTACATCGGCGGCATTTTCTTTTATTGGTTGTCTAGAGTTCCAAAGGGCTC |
| | CAAAAAGATGAAGTCTAAGTGA |
| SEQ ID NO: | MSELDKDSSSNVSSASDHISYNGFDEKADKRIRQLAQQLTRTSTNLDTQDVNGNNNN |
| 1022 | DVQSTVSRSIFSDSLLKEGVNPVFTDINDPNYNEKLDPNSDNFSSYDWVKNISNLANAD |
| | PDYYKPYKLGCSWKNLTAEGNSSDVSYQSTVLNLPLKLATLGYYLLSSGANKKVQILKSV |
| | DGLIKPGELLVVLGRPGSGCTTLLKSITSNTHGFQLTDESEISYDGLTPKEIKKHYRGDVVY |
| | NAEADIHLPHLTVFQTLVTVAKLKTPQNRFKGVTREQFADHVTDVTMATYGLLHTRNT |
| | KVGNDLVRGVSGGERKRVSIAEVTICGSKFQCWDNATRGLDSATALEFIRALKTQAVLQ |
| | NTAATVAIYQCSQDAYDLFDKVCVLDEGYQLFYGSSSKAKEFFIKMGYICPPRQTTADFL |
| | TSVTSPVERILNEEYLAKGIKIPQTPRDMSEYWRNSQEYRDLIREIDEYNAQNNDESKQI |
| | MHDAHVATQSRRARPSSPYTVSYGLQIKYILTRNIWRMKNSFEITGFQVFGNSAMALIL |
| | GSMFYKVMLHPTTDTFYYRGAAMFFAVLFNAFSSLIEIFTLYEARPITEKHKSYSLYHPSA |
| | DAFASIISEIPPKLITSVCFNIIFYFLCNFRRNGGVFFFYYLISIVAVFAMSHLFRCVGSLTKTL |
| | QEAMVPASMLLLALSMYTGFAIPRTKILGWSIWVWYINPLAYLFESLMINEFHGRHFPC |
| | TAYIPAGGSYDSQTGTTRICSVNGAIAGQDYVLGDDYIKSSYAYEHKHKWRGFGVGMA |
| | YVVFFFVVYLVICEYNEGAKQKGEILVFPRSVVKKMKKAKTLNDSSSNVSDVEKATSESIS |
| | DKKLLEESSGSFDDSSEREHFNISKSSAVFHWRNLCYDVQIKSETRRILNNVDGWVKPG |
| | TLTALMGSSGAGKTTLLDCLAERVTMGVITGDIFVDGLPRDTSFPRSIGYCQQQDLHLT |
| | TATVRESLRFSAELRQPADVSVSEKHAYVEEVIKILEMEKYADAVVGVAGEGLNVEQRK |
| | RLTIGVELAAKPKLLVFLDEPTSGLDSQTAWSICQLMKKLAKFGQAILCTIHQPSAILMQE |
| | FDRLLFLQKGGKTVYFGELGDNCTTMIDYFERNGAHKCPPDANPAEWMLEVVGAAPG |
| | SHASQDYNEVWRNSDEYRAVQEELDWMESELPKQATETSAHELLEFASSLWIQYVAV |
| | CIRLFQQYWRTPSYIWSKFLVTIFNALFIGFTFFKADRTLQGLQNQMLAIFMFTVITNPIL |
| | QQYLPSFVTQRDLYEARERPSRTFSWKAFIAAQISVEIPWSILAGTLYFLIYYYAIGFYNNA |
| | SAADQLHERGALFWLFSCAFFVYIVSLGTLVIAFNQVAETAAHLASLMFTMCLSFNGVL |
| | VTSAKMPRFWIFMYRVSPFTYFVDALLSTGVANVEVHCADYELRKFTPPSGLTCGEYM |
| | DPYISAAGTGYLTDPNNTETCSFCQISDTNTFLASVGSSYHRRWRNFGIFICFIAINYIGGI |
| | FFYWLSRVPKGSKKMKSK- |
| SEQ ID NO: | ATGGACGAGGACTTTAAGAAGTTCGCCAACTTTCAAATGTACAACGGTGT |
| 1023 | TGATTCTTCCACCGAAGAAACCATTAAGAACTTGGCTAAGGATATCTCCGT |
| | TAACTCCGGTTTGAAGATCGAAAACTACACTACCTCCTCATCCAAAGAAGT |
| | CGAATCCATTTTGTCTGATTTGGAAGGTGTTGATCCAACTGCTAAAGACTT |
| | GCAAGATCAAAGATTGAACCCATCTTGTGACACCTTCTCTTCATCTTTGTG |
| | GGTTAAGAATTTGGCCGCCATTATTAACAACAACCCAGAGTATTACAAGC |
| | CCTACTCTTTGGATTGCATTTGGCAAAATTTGTCCGCTTACGGTGAAACCT |
| | CTGGTATTGAATCTCAAGCCAATTTGATTAACGCCCCACAAAAGATTATCA |
| | ACTCCGTTTACAGAACTGTCAAGCCAGTCAAGAAAGAAAAGTCCTTCACC |
| | ATCTTGAAAGAGATGGAAGGTTGTATTAACCCAGGTGAGTTGTTGGTTGT |
| | TTTGGGTAAACCAGGTTCTGGTTGTACTACTTTGTTGAAGTCCATTTCCAA |
| | CAACACCAACGGTTTCAAGATTACCAAAGACACCAAATTGTCTTACGCTG |
| | GTTTTACCCCAAGAGAAATGAAGGCTCATTATGGTGGTGAAGTTATCTAC |
| | AATGGTGAAATCGATGTCCACTTGCCAAAGTTGACTGTTTATCAAACCTTG |
| | TACACCGTCGCTAGATTGAAAACTCCACATAACAGAATTCAAGGTGTCGA |
| | CAGAGATATTTTCGCTAAGTACTTGACTGATGTTACCATGGCTACTTATGG |
| | TTTGTCTCATACCAGAGATACCATCATCGGTAACGATTTGATTAGAGGTGT |
| | TTCAGGTGGTGAAAGAAAGAGAGTTTCTATTGCTGAAACCGCTATTTGTG |
| | GTGCTAAATTGCAATGTTGGGATAACGCTACTAGAGGTTTGGATTCTGCT |
| | GCTGCTTTAGATTTCATTAGAGCCTTGAGAGTTAACGCCAATACCATGGG |
| | TGCTTCATCTGCTGTTGCTATCTATCATTGCTCTGAAGGTGCTTACTCTTT |
| | GTTCGATAAGGTCTGCATTTTGGATCAAGGTTACCAGTTGTTTTTCGGTCC |
| | AGCTAATGATGCTAAGCAATACTTTGAACAAATGGGTTACGTTTGCCCAG |
| | ATAGACAAACTACTGCTGATTTCTTGACCTCTGTTACTTCTCCAGAAGAAA |
| | GAGTTTTGAACAAGGACTTCTTGAAGAAGGGTATTGCCATTCCACAAACG |
| | CCTAAAGAAATGAACGAATACTGGCGTAAGTCTCAAGCTTACTCTGAATT |
| | GACTCACGAAATTCAAGCCAAGTTGTCCAAGAACGTTGAAGAATCTAGAA |
| | AGGTTATTAAGGCTGCTCATTTGGCTAAACAATCCGGTAAATGTAGAGAAT |
| | CTTCTCCATACACCGTCAACTACAGATTGCAGATCAAATACTTGCTGTCCA |
| | GAGAAATTTGGAGGATCACTAATTACCCAACCACCAACATTTTGATGTTGT |
| | TGGGTAACTCTGCTATGGCCTTGATTTTGGGTTCTATGTTCTACAAGATCA |
| | TGAAGAAGGATGACACCGAGTCTTTTTACTTTAGAGGTGCTGCTATGTTCT |
| | CTGCCACTTTGTTTAATGCTTTCAGCTGTTTGTTGGAGGTGTTCTCCTTGT |
| | ATGAATCCAGACCAATTATCGAAAAGCACAAGACCTACAGCTTGTATCATC |
| | CATCTGCTGATGCATTCGCCTCCATTATTTCTAGAGTTCCAGTTAAGATTG |
| | CCATTGCCATCTGTTTCAACGTCGTGTTCTACTTTTTGGTCCACTTTAAAA |
| | GAGATGCCGGCTCATTCTTCTTCTATTTCTTGATTAACCTGGTCACCGTGT |
| | TCTCCATGTCTCATATGTATAGAACCTTCGGTTCCATCACTAGATCTTTGC |
| | CAGAAGCTATGTTTCCAGCTGCTGTTTTGTTGTTGGCTATGGCTATGTATA |
| | CTGGTTTCGCTATTCCAAGAACTCAAATGTTAGGTTGGTCTACCTGGATTT |
| | GGTACATTAACCCATTGGCTTACTTGTTCGAATCCTTGATGGTTAACGAAT |
| | TCCACGGTAGAGAATTTGAATGCTCTACCTTTATTCCAATGGGCTCTATGT |
| | ACGCTAATTACACCGGTAACCATAGAATTTGTGCTGCTTTGGGTGCTATT |
| | GCTGGTGAAGATTATGTTTTAGGTGACGACTACATCAGAAACAACTACGG |
| | TTATGAACATTCCCATAAGTGGCGTGGTTTTGGTATTGGTATAGGTTACTC |
| | TGTGTTCTTCTTGATCACCTACTTGATCGTTTGCGAATTGAATCCTGGTAA |
| | GACTCAAAAGGGTGAGATTTTGATATACCCACAGCACATCATCAGAAGAT |
| | TGAGGAAGCAAAAAGAGTCTAAGGGTTCTACCGATTACAACTCTTCTGAC |
| | TTGGAAGCTGGTTCTTCTGATTCCTCTATTACCGATATTACCCTGCTGGAA |
| | GATCCAAAAGAATTGGAAGAAGAGTCTTTCAACTACACCGGTTTGTCTACT |
| | GCTAACAATGTTTTCCATTGGAGAAACGTTTGCTACGACATCGAAACTAAG |
| | AACGAGACTAAGAGGATCTTGAACAACATTGATGGTTGGGTTAAGCCAGG |
| | TACTTTGACTGCTTTGATGGGTGTTTCTGGTGCTGGTAAAACTACTTTATT |
| | GGATTGCTTGGCTGGTAGAGTTACCACCGGTATTATTTCTGGTGATATGT |
| | TCGTTAACGGTTCCTCCAGAGATTCATCTTTCCCAAGATCTATTGGTTACT |
| | GTCAACAACAGGACTTGCATTTGAGAACTTCTACTGTTAGGGAATCCCTG |
| | AGATTTTCTGCTTATTTGAGACAGCCAAAGTCCGTTCCAATTGCAGAAAAG |
| | AATGCCTATGTTGAAGAAGTCATCAGAACCTTGGACATGGAATTATATGCT |
| | GATGCTATCGTTGGTTCTCAAGGTGAAGGTTTGAATGTGGAACAGAGAAA |
| | AAGATTGACTGTCGGTGTTGAATTGGCTGCTAAACCTAAGTTGTTGATTTT |
| | CTTGGATGAACCCACTTCTGGTTTGGATAGTCAAACTGCTTGGTCTATTTG |
| | CCAGTTGATGAGAAAATTGGCCGACGAAAATCAAGCTATTTTGTGCACTA |
| | TTCATCAGCCAACAGCTATCTTGATGGAAAAGTTTGATAGGCTGTTGCTGT |
| | TGGAAAAAGGTGGTAAAACAGTTTACTTCGGTGAATTAGGTTCAGGTTGC |
| | AGAACCATGATTGACTACTTTGAAAGACATGGTGCTCCAAGATGTCCTAG |
| | AGATGCTAATCCAGCTGAATGGATGTTGGATATAGTTAGATCTCCAAAGA |
| | ACTCCGAATTGCAAGAGGATTACCATGATATCTGGCGTAATTCCATCGATT |
| | ACAAGTTGGTGCAAAAAGAACTGGACAAGTTGTCTAATGCTTCCACTGGT |
| | TACTCTACAAACACCGATTATGAAGATGATACCGAATTCGCTACCTCCTTG |
| | TTGTATCAAACTACTATTGTCGGTAAGAGGCTGATGGAACAATATTGGAG |
| | ATCACCACAATACCTGTGGTCTAAGTTTGCTTTGACCATCATCAACATGCT |
| | GTTCATCGGTTTTACTTTCTTCAGAACCTCTGCTAGCTTGCAAGGTTTACA |
| | ATCTCAAACTTTGGCCATCTTCATGTTCACCGTTATTTTCAACCCACTGCT |
| | GCAACAATATTTGCCAAACTATGCTCAACAGAGGGACTTGTACGAAGTTA |
| | GAGAAAGACCATCTAGAACGTTTTCATGGAAGGCTTTCATCATCTCCCAA |
| | ATCTTGATTGAGGTTTTCTGGAACTTCATTGCTGGTACTGTTGCTTTCGTT |
| | ATCTTCTACTACACCATCGGCTTTTACAGAAATGCTTCTTTGGCTAACCAG |
| | TTGTACGAAAGAGGTGTCTTGTTTTGGTTGTTATGTACCGCTTACTTCGTC |
| | TTTGTTGGTTCCATGGGTATTTTGACCATGTCCGCTATTGAAATTTTGGAA |
| | AACGCTGCCTACATTGCCTCATTGATGTTTACTATGTGTTTGTCCTTCTGC |
| | GGTGTTTTCACTACTAGAAAAGCTATGCCAAGATTCTGGATTTTCATGTAC |
| | AGAGTTTCTCCCTTGACCTACTTGTTGGAAGCTTTGTTGTCTGTTGGTGTT |
| | TCTAACGTTCCAATCAAGTGCAACGAAAACGAGTTCTTGAAATTGGTTCCA |
| | CCAACTGGTCAAACATGTGGTGATTATTTGTCTCCCTATTTGTTCGTTGCT |
| | CAAACTGGTTATTTGAAGGATCAATTGGCTACCGATGTTTGCTACTTGTGT |
| | GAATTGTCTCACACCAACGATTACTTGAAGAGAGTTGACGTTGATTACTCT |
| | CAAAGATGGCGTAACTACGGTATCTTCATCTCTTACATCGTGTTCAATTAC |
| | TGCGCCGGTATCTTGTTGTACTATATCTTTAGAGTCCCCAAGAAGAATCA |
| | GACCAAGATTAAGCCATCTAAGTAA |
| SEQ ID NO: | MDEDFKKFANFQMYNGVDSSTEETIKNLAKDISVNSGLKIENYTTSSSKEVESILSDLEGV |
| 1024 | DPTAKDLQDQRLNPSCDTFSSSLWVKNLAAIINNNPEYYKPYSLDCIWQNLSAYGETSGI |
| | ESQANLINAPQKIINSVYRTVKPVKKEKSFTILKEMEGCINPGELLVVLGKPGSGCTTLLKS |
| | ISNNTNGFKITKDTKLSYAGFTPREMKAHYGGEVIYNGEIDVHLPKLTVYQTLYTVARLK |
| | TPHNRIQGVDRDIFAKYLTDVTMATYGLSHTRDTIIGNDLIRGVSGGERKRVSIAETAICG |
| | AKLQCWDNATRGLDSAAALDFIRALRVNANTMGASSAVAIYHCSEGAYSLFDKVCILD |
| | QGYQLFFGPANDAKQYFEQMGYVCPDRQTTADFLTSVTSPEERVLNKDFLKKGIAIPQT |
| | PKEMNEYWRKSQAYSELTHEIQAKLSKNVEESRKVIKAAHLAKQSGKCRESSPYTVNYR |
| | LQIKYLLSREIWRITNYPTTNILMLLGNSAMALILGSMFYKIMKKDDTESFYFRGAAMFS |
| | ATLFNAFSCLLEVFSLYESRPIIEKHKTYSLYHPSADAFASIISRVPVKIAIAICFNVVFYFLVH |
| | FKRDAGSFFFYFLINLVTVFSMSHMYRTFGSITRSLPEAMFPAAVLLLAMAMYTGFAIPR |
| | TQMLGWSTWIWYINPLAYLFESLMVNEFHGREFECSTFIPMGSMYANYTGNHRICAA |
| | LGAIAGEDYVLGDDYIRNNYGYEHSHKWRGFGIGIGYSVFFLITYLIVCELNPGKTQKGEI |
| | LIYPQHIIRRLRKQKESKGSTDYNSSDLEAGSSDSSITDITLLEDPKELEEESFNYTGLSTAN |
| | NVFHWRNVCYDIETKNETKRILNNIDGWVKPGTLTALMGVSGAGKTTLLDCLAGRVTT |
| | GIISGDMFVNGSSRDSSFPRSIGYCQQQDLHLRTSTVRESLRFSAYLRQPKSVPIAEKNAY |
| | VEEVIRTLDMELYADAIVGSQGEGLNVEQRKRLTVGVELAAKPKLLIFLDEPTSGLDSQT |
| | AWSICQLMRKLADENQAILCTIHQPTAILMEKFDRLLLLEKGGKTVYFGELGSGCRTMID |
| | YFERHGAPRCPRDANPAEWMLDIVRSPKNSELQEDYHDIWRNSIDYKLVQKELDKLSN |
| | ASTGYSTNTDYEDDTEFATSLLYQTTIVGKRLMEQYWRSPQYLWSKFALTIINMLFIGFT |
| | FFRTSASLQGLQSQTLAIFMFTVIFNPLLQQYLPNYAQQRDLYEVRERPSRTFSWKAFIIS |
| | QILIEVFWNFIAGTVAFVIFYYTIGFYRNASLANQLYERGVLFWLLCTAYFVFVGSMGILT |
| | MSAIEILENAAYIASLMFTMCLSFCGVFTTRKAMPRFWIFMYRVSPLTYLLEALLSVGVS |
| | NVPIKCNENEFLKLVPPTGQTCGDYLSPYLFVAQTGYLKDQLATDVCYLCELSHINDYLK |
| | RVDVDYSQRWRNYGIFISYIVFNYCAGILLYYIFRVPKKNQTKIKPSK- |
| SEQ ID NO: | ATGTCCGAGAAGAAGGACATCATTGATTCTGGTGCTATGTCCCAAGTTGACGAATC |
| 1025 | TTCTTCTTTGAACTTGCAATCCTACGATGGTTTCGATCAAAACGCCCAAGATAAGATT |
| | AGACAATTGGCCAGATCTTTGACCAACCAGTCATCTACTACTCATAACAATGATGCT |
| | GCCAGCTTGTTCTCTAATGTTAAGGGTGTTAATCCCGTTTTCACCGATCCATCTAATC |
| | CAGAATATGACGAAAGATTGGATCCAGAGTCTGAGAACTTTTCTTCTACTGCTTGGG |
| | TTAAGAACATGGCTAATTTGACTGCTGCTGATCCAGATTACTACAAGCCATATTCTTT |
| | GGGTTGTGTTTGGAAAGATTTGACCGCTTCTGGTGATTCTTCTGATGTTGTTTATCA |
| | GTCCACCGTTTTCAACATGCCAACGAAGTTATTGAAAACCGCTTTCAGAAAAGCTAG |
| | GCCAGCTAAAGAATCTGATACCTTCCAAATTCTGAAGCCAATGGAAGGTTGTATTAA |
| | CCCAGGTGAATTATTGGTTGTTTTGGGTAGACCAGGTTCTGGTTGTACTACTTTGTT |
| | GAAGTCCATTTCCTCTAACACCCATGGTTTTAACGTTGGTAAGGATTCCACCATTTCT |
| | TACAATGGTTTGACTCCAAAGGCCATCAACAGACATTATAGAGGTGAAGTTGTTTAC |
| | AACGCCGAATCCGATGTTCATTTGCCACATTTGACTGTTTTCGAAACCTTGTACACTG |
| | TCGCCAGATTGAAAACACCATCTAATAGAGTTCAAGGTGTTGACAGAGATACTTAC |
| | GCTAAACATTTGACCGATGTTACTATGGCTACTTACGGTTTGTCTCATACCAGAAAT |
| | ACCAAGGTTGGTAACGATTTGGTTAGAGGTGTTTCTGGTGGTGAAAGAAAGAGAG |
| | TTTCTATTGCCGAAGTTACCATTTGCGGTTCTAAGTTTCAATGTTGGGATAACGCTAC |
| | TAGAGGTTTGGATTCTGCTACAGCTTTGGAATTCATTAGAGCCTTGAAAACTCAAGC |
| | TACCTTGACTAATACTGCTGCTACTATTGCTATCTACCAATGCTCTCAAGATGCCTAC |
| | GATTTGTTCGATAAGGTTTGTGTCTTGTACGGTGGTTACCAAATTTTCTATGGTTCTG |
| | CTCAAAAGGCTAAAAAGTACTTCGAAACTATGGGTTACCAGTGTCCAGAAAGACAA |
| | ACTACTGCTGATTTCTTGACTTCTGTTACTTCTCCAGCTGAAAGAGTTATCAACCCAG |
| | ATTTTATTGGTAGGGGTATCCAAGTTCCACAAACTCCAGAAGATATGAACAACTATT |
| | GGAGAAACTCCCCAGAGTACAAAGAATTGATCAACGAAATCGATACCCACTTGGCC |
| | AACAATCAAGATGAATCCAGAAACTCCATCAAAGAAGCTCATATTGCCAAGCAATCT |
| | AACAGAGCTAGACCTGGTTCTCCATACACTGTTAATTATGGTATGCAGGTCAAGTAC |
| | CTGTTGACTAGAAATGTTTGGAGGATCAAGAACAACTCCTCTGTCCAGTTGTTTATG |
| | ATTTTCGGTAATTGCGGTATGGCCTTCATTTTGGGTTCTATGTTTTACAAGGTTATGA |
| | AGCACGATTCCACCTCTACTTTTTACTACAGAGGTGCTGCTATGTTCTTCGCCATTTT |
| | GTTTAATGCTTTCTCGTGCTTGTTGGAGATCTTCTCATTATATGAAGCCAGACCAATC |
| | ACCGAAAAGCACAGATCTTATTCCTTGTATCATCCATCTGCTGATGCTTTCGCTTCCA |
| | TTTTCTCTGAAATTCCTACCAAGATCATTATCGCCATCGGTTTCAACATTATCTACTAT |
| | TTCTTGGTCAACTTCGAGAGAAATGGCGGTGTTTTCTTTTTCTACTGGCTGATTAACA |
| | TCGTTGCTGTTTTCGCTATGTCTCACTTGTTTAGAACTGTTGGTTCTCTGACTAAGAC |
| | CTTGTCTGAAGCTATGATTCCAGCATCTATGTTGTTGTTGGCTATGTCTATGTTTACC |
| | GGTTTCGCTATTCCAAAGACCAAAATGTTAGGTTGGTCTAAGTGGATCTGGTACATT |
| | AACCCAATTGCCTACTTGTTCGAGTCCTTGATGATTAACGAATTCCACGGTAGAAGA |
| | TTTGAATGCGCTGCTTTTATTCCATCTGGTCCAGCTTACTCTAACATTACTGCTACAG |
| | AAAGAGTTTGCGCTGTTTCAGGTTCTGTTGCTGGTCAATCTTATGTTTTAGGTGACG |
| | ATTACATCCGTGTCTCTTATGACTACTTGCACAAACATAAGTGGCGTGGTTTTGGTA |
| | TTGGTATGGCATACGCTATCTTTTTCTTGTTCGCTTACTTAGTTGTCTGCGAGTATAA |
| | TGAAGGTGCTAAGCAAAAAGGTGAGATGTTGGTTTTTCCACAATCCGTCTTGAGAA |
| | AGTTGAGAAAAGAAGGTCAGCTGAAGAAGGATTCCGAAGATATAGAAAACGGCTC |
| | TAACTCTTCTACCACTGAAAAACAGTTGTTGGAAGATTCCGATGAGGGTTCTTCTAA |
| | TGGTGATTCAACTGGTTTGGTTAAGTCCGAAGCTATTTTTCATTGGAGGAACTTGTG |
| | TTACGACGTCCAAATCAAAGACGAAACTAGAAGGATCTTGAACAACGTTGATGGTT |
| | GGGTAAAACCAGGTACTTTAACTGCTTTGATGGGTTCTTCAGGTGCTGGTAAAACTA |
| | CTTTATTGGACTGTTTGGCTGAAAGGGTTACAATGGGTGTAATTACTGGTGATGTTT |
| | TGGTTGATGGTAGACCAAGAGATGAATCTTTCCCAAGATCTATTGGTTACTGTCAAC |
| | AACAAGACCTGCACTTGAAAACCTCTACTGTTAGAGAATCCTTGAGATTCTCTGCTT |
| | ACTTGAGACAACCAGCTGAAGTTTCTGTTGAAGAAAAGGATGCTTACGTCGAAGAA |
| | GTCATTAAGATCTTGGAGATGGAAAAGTACGCTGATGCTGTTGTTGGTGTTGCCGG |
| | TGAAGGTTTAAATGTTGAACAAAGAAAGCGTTTGACCATCGGTGTTGAATTGGCTG |
| | CTAAACCTAAGTTGTTGGTCTTTTTGGATGAACCTACTTCTGGTTTGGATAGTCAAAC |
| | TGCTTGGTCTATTTGCCAGCTGATGAGAAAATTGGCTTCTCATGGTCAAGCTATCTT |
| | GTGCACTATTCATCAACCATCCGCTATTTTGATGCAAGAATTCGATAGGTTGCTGTTC |
| | TTGCAGAAAGGTGGTAAGACTGTTTACTTCGGTGAATTAGGTGAAGGCTGCCAAGT |
| | TATGATTGACTACTTTGAAAGAAACGGCTCCCATAAGTGTCCACCAGATGCTAATCC |
| | TGCTGAATGGATGTTGGAAGTTGTCGGTGCTGCTCCAGGTTCTCATGCTAATCAAG |
| | ATTATCATGAAGTCTGGCGTAACTCCGAAGAATTCAGAATAGTTCACGAAGAGTTG |
| | GACTTGATGGAAAGAGAATTACCAGCTAAATCTGCTGGTGTTGATACCGATCATCA |
| | AGAATTTGCTACTGGTTTGTTCTATCAGACCAAGTTGGTTTCCGTTAGGTTGTTCCAA |
| | CAGTATTGGAGATCACCTGAATACTTGTGGGCTAAGTTTGTGTTGACTATCTTCAAC |
| | GAGCTGTTCATCGGTTTTACTTTCTTTAAGGCTGGTACTTCATTGCAGGGCTTGCAA |
| | AATCAAATGTTGGCTGCTTTCATGTTCACCGTCATTTTTAACCCACTGTTGCAGCAAT |
| | ACTTGCCATCTTTTGTCCAACAAAGAGACTTGTACGAAGCTAGAGAAAGACCATCTA |
| | GAACATTTTCTTGGAAGGCTTTCATCGTGTCCCAAATATTGGTTGAAGCTCCATGGA |
| | ATTTCTTGGCAGGTACATTGGCTTACTTCATCTATTACTACCCAATCGGTTTCTACGA |
| | AAACGCTTCTTACGCAGGTCAATTGCACGAAAGAGGTGCTTTGTTCTGGTTATTTTC |
| | TACCGCTTTCTACGTTTACGTTGGTTCTATGGGTTTCTTGACCGTTTCCTTTAACGAA |
| | ATTGCTGAAAACGCTGCTAACTTGGCCTCTTTGATGTTTACAATGGCCTTGTCTTTTT |
| | GCGGTGTTATGACAACTCCATCTGCAATGCCAAGATTTTGGATCTTCATGTACAGAG |
| | TCTCTCCATTGACATACTTCGTTCAAGGTATTTTGGCTGTTGGTTTGGCTAACACCAA |
| | GATCGAATGTTCTTCATCTGAGTTCTTGCAATTTGAAGCACCATCAGGTATGACTTG |
| | TGGTAATTACATGGAAGCCTATTTGGATTATGCTGGTACTGGTTACTTGAAGGATGA |
| | ATCAGCTACTGGTACTTGTGAATTCTGCGAATACTCTTACACCAACGACTACTTGTCC |
| | TCCATTAACTCTTATTACTCTCAGAGATGGCGTAATTGGGGTATTTTCATTTGTTACA |
| | TTGCCATCAACTACATCGGTGGTATTGCTTTCTATTACTTGGCTAGAGTTCCCAAGAA |
| | ATCTAAGGTTGCTAAGAAGTAA |
| SEQ ID NO: | MSEKKDIIDSGAMSQVDESSSLNLQSYDGFDQNAQDKIRQLARSLTNQSSTTHNNDAA |
| 1026 | SLFSNVKGVNPVFTDPSNPEYDERLDPESENFSSTAWVKNMANLTAADPDYYKPYSLG |
| | CVWKDLTASGDSSDVVYQSTVFNMPTKLLKTAFRKARPAKESDTFQILKPMEGCINPG |
| | ELLVVLGRPGSGCTTLLKSISSNTHGFNVGKDSTISYNGLTPKAINRHYRGEVVYNAESD |
| | VHLPHLTVFETLYTVARLKTPSNRVQGVDRDTYAKHLTDVTMATYGLSHTRNTKVGND |
| | LVRGVSGGERKRVSIAEVTICGSKFQCWDNATRGLDSATALEFIRALKTQATLTNTAATI |
| | AIYQCSQDAYDLFDKVCVLYGGYQIFYGSAQKAKKYFETMGYQCPERQTTADFLTSVTS |
| | PAERVINPDFIGRGIQVPQTPEDMNNYWRNSPEYKELINEIDTHLANNQDESRNSIKEA |
| | HIAKQSNRARPGSPYTVNYGMQVKYLLTRNVWRIKNNSSVQLFMIFGNCGMAFILGS |
| | MFYKVMKHDSTSTFYYRGAAMFFAILFNAFSCLLEIFSLYEARPITEKHRSYSLYHPSADA |
| | FASIFSEIPTKIIIAIGFNIIYYFLVNFERNGGVFFFYWLINIVAVFAMSHLFRTVGSLTKTLSE |
| | AMIPASMLLLAMSMFTGFAIPKTKMLGWSKWIWYINPIAYLFESLMINEFHGRRFECA |
| | AFIPSGPAYSNITATERVCAVSGSVAGQSYVLGDDYIRVSYDYLHKHKWRGFGIGMAYA |
| | IFFLFAYLVVCEYNEGAKQKGEMLVFPQSVLRKLRKEGQLKKDSEDIENGSNSSTTEKQL |
| | LEDSDEGSSNGDSTGLVKSEAIFHWRNLCYDVQIKDETRRILNNVDGWVKPGTLTALM |
| | GSSGAGKTTLLDCLAERVTMGVITGDVLVDGRPRDESFPRSIGYCQQQDLHLKTSTVRE |
| | SLRFSAYLRQPAEVSVEEKDAYVEEVIKILEMEKYADAVVGVAGEGLNVEQRKRLTIGVE |
| | LAAKPKLLVFLDEPTSGLDSQTAWSICQLMRKLASHGQAILCTIHQPSAILMQEFDRLLF |
| | LQKGGKTVYFGELGEGCQVMIDYFERNGSHKCPPDANPAEWMLEVVGAAPGSHAN |
| | QDYHEVWRNSEEFRIVHEELDLMERELPAKSAGVDTDHQEFATGLFYQTKLVSVRLFQ |
| | QYWRSPEYLWAKFVLTIFNELFIGFTFFKAGTSLQGLQNQMLAAFMFTVIFNPLLQQYL |
| | PSFVQQRDLYEARERPSRTFSWKAFIVSQILVEAPWNFLAGTLAYFIYYYPIGFYENASYA |
| | GQLHERGALFWLFSTAFYVYVGSMGFLTVSFNEIAENAANLASLMFTMALSFCGVMTT |
| | PSAMPRFWIEMYRVSPLTYFVQGILAVGLANTKIECSSSEFLQFEAPSGMTCGNYMEAY |
| | LDYAGTGYLKDESATGTCEFCEYSYTNDYLSSINSYYSQRWRNWGIFICYIAINYIGGIAFY |
| | YLARVPKKSKVAKK |
| SEQ ID NO: | ATGGACAACGAATCCACCGATTCCTTGGTTGAATATCAAGGTTTCGATAACAAGGTC |
| 1027 | GAGAACCAGATTAGAGATTTGGCTAGAACTTTGTCCAGAGCCTCTTTGAAAGAACA |
| | AGGTTCTAACCACGATTTGGTTTCTGGTGCTGCTGATGATGATACCAGATCTATTTT |
| | CTCTACCAAGTACGAAGGTGTCAACCCAGTTTTCTCTGATGCTAATGCTCCAGGTTA |
| | TGATGCTAGATTGGATCCTAATTCCGACAACTTTTCTTCTGCTGCTTGGATCAGAAAT |
| | ATGGTTGCTTTGGCTGGTTGTGACCCAGAATATTACAAACATTACACCATTTCTTGCT |
| | GCTGGAAGGATTTGAGAGCTTTTGGTGATCCAACTGATGTTGCTTACCAATCTACTA |
| | TGGTTAACATGCCCCAAAAGATCTTCTCACAAGTCAAGAGATCTTTGTGCAAGCCAA |
| | AGGATGAACAAGTTTTCGATATCTTGAAGCCAATGGACGGTTTGTTGAAAGCTGGT |
| | GAATTATTGGTTGTTTTGGGTAGACCAGGTTCTGGTTGTTCTACCTTGTTGAAAACT |
| | ATTTCCGCTAACGTTCAAGGTTACCACTTGGACGAAAAATCCATCGTTTCTTACAAT |
| | GGTTTGGATGCTAAGACTATCGGTAAACACTATAGAGGTGAAGTTGTTTACAACGC |
| | CGAATCCGATGTTCATTTTCCACATTTGTCTGTCTTTGAAACCCTGTACAACATTGCT |
| | TTGTTGGTTACTCCATCCAACAGAGTTAAGGGTGTTTCTAGAGAAGATTTCGCTAAG |
| | CACGTTACTGAAGTTGCTATGGCTACTTATGGTTTGTCTCATACCAAAGATACCAAG |
| | GTCGGTAACGAATTGGTTAGAGGTGTTTCAGGTGGTGAAAGAAAGAGAGTTTCTAT |
| | TGCCGAAGTTACCATTTGGGGTTCTAGATTTCAATGTTGGGATAACGCTACTAGAGG |
| | TTTGGATTCTGCTACTGCTTTGGAATTCATTAGAGCCTTGAAAACCTCTACCGCTATT |
| | TCTGGTTCTACTGGTGTTATTGCTATCTACCAATGTTCCCAAGATGCCTACGATTTGT |
| | TCGATAAGGTTTGTGTTTTACACGAGGGCTATCAAATCTATTACGGTTCTGCTAAAG |
| | AAGCCAAGGGTTACTTCGAAAGAATGGGTTATGAATCCCCATCTAGACAAACTACT |
| | GCTGATTTCTTAACCGCTGTTACTAATCCAGCTGAAAGAATCCCAAATGAAGCCTTT |
| | GTCAAAGAAGGTCGTTACATTCCATCTACCGCAAAAGAAATGGAAGAATACTGGCG |
| | TAATTCTCCAGAATATGCTGCTTTGAGACAAGAAATTGAAGCCGAATTGTCTAAGG |
| | ATTCTACCGAAGCTAGACAAGAATTGCTAGATGCTCATGTTGCTAGACAATCCAAG |
| | AGACAAAGAAAGTCCTCTCCTTACATCGTTAACTTCGGTATGCAAGTTAAGTACTTG |
| | ACGATGAGAAACTTCCTGAGGATCAAAAAGTCTTACGGTATTACCGTTGGTACTATT |
| | GCTGGTAATACTGCTATGGCATTGGTTTTGGGTTCCATCTTTTACAAGTCTATGCAA |
| | GATACCACTACCGCCACATTTTTCTACAGAGGTGCTGCTATGTTTATCGCCGTTTTGT |
| | TTAATGCTTTCGCCTCCATGTTGGAGATCTTCAGCTTGTATGAAGCCAGACCAATTAT |
| | CGAAAAGCACAGAAGATACAGCTTGTACCATCCATCTGCTGATGCTTTAGCTTCTAT |
| | GTTGTCTGAATTGCCATCTAAGATTGTCACCGCCATTTGTTTCAACCTGATCTTGTAT |
| | TTCATGGTCAACTTCAGAAGAGAACCAGGTCCATTCTTCTTCTACTTTCTGATGAATT |
| | TCTTGGCCACCTTGGTTATGTCTGCTATTTTTAGATGTGTTGGTTCCGCTACTAAGAC |
| | CTTGTCTGAAGCTATGGTTCCAGCTTCTTGTTTGTTGTTGGCTATCTCATTATACGTC |
| | GGTTTCTCCATTCCAAAGAAGGACTTGTTAGGTTGGTCAAGATGGATTTGGTACATC |
| | AACCCATTGTCCTACATCTTCGAATCCTTGATGATCAATGAATTCGTCGGTAGAGAT |
| | TTCCCATGTGCTACTTTTGTTCCATCAGGTGCTGGTTATGAAGATATCGGTTCTTTAG |
| | AAAGAGTCTGCAATACTGTTGGTGCTGTTCCAGGTAATCCTAGAGTTTCTGGTTTGG |
| | CTTTCATTGAACAAACCTATGGTTACTCTGCTTCTCATAGATGGCGTTCTTTAGGTAT |
| | TGGTATTGCCTTCTTCATTTTCTTCACCGCCTTTTACTTGTTGTTCTGCGAATTCAATG |
| | AATCCGCCGTTCAAAAGGGTGAGATTTTGTTGTTTCCAAAGTCCGTCTTGAAGTCCA |
| | AAAGAAGGCAGTTGTCTAAGTCCAAGAACGATATTGAAACAGCCGATGATCCTGAA |
| | GGTGGTGTTACTGATCAAAAGTTGTTGCAAGACTCCTTGGAAGAGTCTAATGTCTCT |
| | TCATCTTCTGAAAAGTCTGCTAACGCTAATGTCGGTTTGTCTAAATCCGAAGCTATTT |
| | TCCATTGGAGAAACGTTTGTTACGACGTCCAGATTAAGAAAGAAACCCGTAGAATC |
| | TTGTCCAACGTTGATGGTTGGGTTGAACCAGGTACTTTGACTGCTTTGATGGGTTCT |
| | TCTGGTGCAGGTAAAACTACTTTGTTGGATTGCTTGGCATCTAGAGTTACCATGGGT |
| | GTTATTACTGGTGATATGTTCGTTAACGGTCACTTGAGAGATAACAGCTTTCCAAGA |
| | TCTATTGGTTACTGTCAACAACAGGACTTGCATTTGGCTACTGCTACTGTTAGAGAA |
| | TCTTTGAGATTCTCCGCTTACTTGAGACAATCCTCTGAAGTTTCAATCGAAGAGAAG |
| | AACTCCTACGTTGAAGATGTCTTGAGGATTTTGGAAATGGAACCTTACGCTGATGCT |
| | GTTGTTGGTATAGCCGGTGAAGGTTTGAATGTCGAACAAAGAAAAAGATTGACCAT |
| | CGGTGTTGAATTGGCTGCTAAACCTAAGTTGTTGTTGTTTTTGGATGAACCCACCTC |
| | CGGTTTAGATTCTCAAACTGCTTGGTCTATTTGCCAGTTGATGAGAAAATTGGCTGA |
| | TCACGGTCAAGCCATTTTGTGTACTATTCATCAACCATCCGCTCTGTTGATGCAAGA |
| | ATTTGATAGACTGCTGTTCTTGCAGAAAGGTGGTAAAACCATATACTTCGGTGACTT |
| | AGGTCCAGGTTGTGAAACTATGATCGACTACTTTGAATCTCATGGTGCTGATAAGTG |
| | TCCAGAAGGTGCTAATCCTGCAGAATGGATGTTGGAAGTTATTGGTGCTGCACCAG |
| | GTTCACATGCTAATCAAGATTATCATGAAGTCTGGCGTAACTCCGAAGAGTATAATG |
| | CTGTTCAACAAAAGTTGGACTGGATGGAAGTTGAGTTGGCTAAAAAGCCATTGGAC |
| | AACTCTTCAGAACAATCTGAATTCGGCACTTCCATTTTCTACCAGTGTAAGATAGTTA |
| | CCTTGAGGTTGTTCCAACAGTACTACAGAACTCCATCTTACATTTGGTCCAAGTTGTT |
| | CTTGACCATCTTCTCCCAATTATTCATCGGCTTCACCTTTTTCAAAGCCAAGTTGGAC |
| | ATGCAAGGTCTGCAAAATCAACTGTTTGCTGTTTTCACTTTCACCGTGATTTTTAACC |
| | CAGCTTGCCAACAATACTTGCCCTTGTTCGTTTCTCAAAGAGACTTGTACGAAGCAA |
| | GAGAAAGACCATCTAGAACATTTTCTTGGTTGGCCTTCATCTACTCCCAAATCGTTGT |
| | TGAAATTCCATTCAACGTTGTCTTGGGTACTATAGGCTTTTTCGTTTTCTATTACCCA |
| | ATCGGCTTTTACAACAACGCCTCTTATTCTGACCAATTGAACGAAAGAGGTGTCCTG |
| | TTTTGGTTATTCTCTGTTGCTTTCTACGTGTTCATCTCCTCTATGGGTCAATTGTGTAT |
| | TGCAGGTTTGGAATACGCTGAAGCTGCAGGTAATTTGGCATCTTTGTGTTTCACTAT |
| | GTCCTTGAATTTCTGCGGTGTTTTTGGTGGTCCAGGTGTTTTGCCAGGTTTTTGGGTT |
| | TTTATGTACAGAGTCTCTCCCCTGTCTTACTTCATTGATGGTGTTTTGTCTACAGCCTT |
| | GGCTAACAATCCAGTTACTTGTGCTGATTACGAGTACTTGTCCTTTGTTCCTAAATCT |
| | GGTGAAACTTGTGGTGAGTACATGTCTACTTACATTGCTACTTACGGTGGTTACATC |
| | TTAGATCCAGATGCTACAGATGAATGCTCCTTCTGTAGAATTTCTTCTACCAACGCTT |
| | TCCTGTCCTCTTTCCAATCTTCTTATCATAGACGTTGGAGGAACTTCGGAATCTTCAT |
| | CGTTTTTATCGTTTTCAATTGGGCCGGTTGCATCTTCTTTTACTGGTTGGCTAGAGTT |
| | CCTAAGAAGAACAATAGAGTTGCCAACGAAAGAAATCCAGATAGAGAAACCACCA |
| | AGCAAATTTCTACTCATGGTGAAAAGTCCAAGCCACAACAAATTGAACAAGTCTAA |
| SEQ ID NO: | MDNESTDSLVEYQGFDNKVENQIRDLARTLSRASLKEQGSNHDLVSGAADDDTRSIFST |
| 1028 | KYEGVNPVFSDANAPGYDARLDPNSDNFSSAAWIRNMVALAGCDPEYYKHYTISCCW |
| | KDLRAFGDPTDVAYQSTMVNMPQKIFSQVKRSLCKPKDEQVFDILKPMDGLLKAGELL |
| | VVLGRPGSGCSTLLKTISANVQGYHLDEKSIVSYNGLDAKTIGKHYRGEVVYNAESDVHF |
| | PHLSVFETLYNIALLVTPSNRVKGVSREDFAKHVTEVAMATYGLSHTKDTKVGNELVRG |
| | VSGGERKRVSIAEVTICGSRFQCWDNATRGLDSATALEFIRALKTSTAISGSTGVIAIYQC |
| | SQDAYDLFDKVCVLHEGYQIYYGSAKEAKGYFERMGYESPSRQTTADFLTAVTNPAERI |
| | PNEAFVKEGRYIPSTAKEMEEYWRNSPEYAALRQEIEAELSKDSTEARQELLDAHVARQ |
| | SKRQRKSSPYIVNFGMQVKYLTMRNFLRIKKSYGITVGTIAGNTAMALVLGSIFYKSMQ |
| | DTTTATFFYRGAAMFIAVLFNAFASMLEIFSLYEARPIIEKHRRYSLYHPSADALASMLSEL |
| | PSKIVTAICFNLILYFMVNFRREPGPFFFYFLMNFLATLVMSAIFRCVGSATKTLSEAMVP |
| | ASCLLLAISLYVGFSIPKKDLLGWSRWIWYINPLSYIFESLMINEFVGRDFPCATFVPSGA |
| | GYEDIGSLERVCNTVGAVPGNPRVSGLAFIEQTYGYSASHRWRSLGIGIAFFIFFTAFYLL |
| | FCEFNESAVQKGEILLFPKSVLKSKRRQLSKSKNDIETADDPEGGVTDQKLLQDSLEESN |
| | VSSSSEKSANANVGLSKSEAIFHWRNVCYDVQIKKETRRILSNVDGWVEPGTLTALMGS |
| | SGAGKTTLLDCLASRVTMGVITGDMFVNGHLRDNSFPRSIGYCQQQDLHLATATVRES |
| | LRFSAYLRQSSEVSIEEKNSYVEDVLRILEMEPYADAVVGIAGEGLNVEQRKRLTIGVELA |
| | AKPKLLLFLDEPTSGLDSQTAWSICQLMRKLADHGQAILCTIHQPSALLMQEFDRLLFLQ |
| | KGGKTIYFGDLGPGCETMIDYFESHGADKCPEGANPAEWMLEVIGAAPGSHANQDYH |
| | EVWRNSEEYNAVQQKLDWMEVELAKKPLDNSSEQSEFGTSIFYQCKIVTLRLFQQYYR |
| | TPSYIWSKLFLTIFSQLFIGFTFFKAKLDMQGLQNQLFAVFTFTVIFNPACQQYLPLFVSQ |
| | RDLYEARERPSRTFSWLAFIYSQIVVEIPFNVVLGTIGFFVFYYPIGFYNNASYSDQLNERG |
| | VLFWLFSVAFYVFISSMGQLCIAGLEYAEAAGNLASLCFTMSLNFCGVFGGPGVLPGFW |
| | VFMYRVSPLSYFIDGVLSTALANNPVTCADYEYLSFVPKSGETCGEYMSTYIATYGGYILD |
| | PDATDECSFCRISSTNAFLSSFQSSYHRRWRNFGIFIVFIVFNWAGCIFFYWLARVPKKN |
| | NRVANERNPDRETTKQISTHGEKSKPQQIEQV |
| SEQ ID NO: | ATGTCCCAAGAACACTCCGACCAATCATTATATGATGGCCCAAACAAGAAAGAGAT |
| 1029 | CAGAGATTTGGCTAGAACTTTGACTGCTGCTTCTGTTGCTGTTTCTGGTAATTCTGAT |
| | GCTGCTGTTAATCCATTGGCTGCTCAACCAGGTGAACCAGGTTATAATGCTAGATTG |
| | GATCCTAACTCCGACGAATTTTCTTCAGAAGCTTGGGTTAGAAACTTGTCTCATTTG |
| | ACAGCTGAAAACCCAGATTACTACAAGCCATTTTCTTTGGGTTGTGCTTGGAAGAAT |
| | TTGAGAGCTTATGGTGATTCTACCGATGTTGCTTACCAATCTACTGTTGCTAATTTGC |
| | CATGGAAGTTGTTGCAATTCGGTTACAGATGTGTCAGAAAGTCTAGACCATCTGAT |
| | AAGTTCGACATCTTGAAGTCCATGGATGGTATTTTGAACCCAGGTGAATTATTGGTT |
| | GTTTTGGGTAGACCAGGTTCTGGTTGTTCTACTTTGTTGAAGTCTATCTCCTCTAACA |
| | CCCATGGTTTTAAAGTTGCTCCAGAATCCGAAATCAGATACGATGGTTTGACCCCAA |
| | AAGAAATTGCTAAACACTACAGAGGTCAAGTTGTTTACAACGCCGAATCTGATGTTC |
| | ATTTCCCACATTTGTCTGTTTTCGACACCTTAAAGACCATTGCTTTGTTGTCTACTCCA |
| | GCCAATAGAATCGAAGGTATGGATAGAGAAACCTACGCTAAACATGTTACCGAAGT |
| | TTACATGGCTACTTACGGTTTGTCTCATACCAGAAATACCAAGGTTGGTAACGATTT |
| | GGTTAGAGGTGTTTCAGGTGGTGAAAGAAAGAGGGTTTCTATTGCTGAAGTTGCTA |
| | TTTGCGGTTCTAAGTTGCAATGTTGGGATAATGCTACTAGAGGTTTGGATTCTGCTA |
| | CTGCTTTGGAATTCATTAAGGCCTTGAGAGTTAATGCCCAAATGACTAATACCTCCG |
| | GTGTTATTGCTATCTACCAATGTTCTCAAGATGCCTTCGATTTGTTCGATAAGGTTTG |
| | TGTTTTACACGAGGGTTATCAGATCTATTATGGTCCAGCATCTGAAGCCAAGCAATA |
| | CTTTGAAGATATGGGTTACGTTTCCCCAGAAAGACAAACTACTGCTGATTTCTTAAC |
| | CGCTGTTACTAATCCAGCCGAAAGGATTATGAATCAAGAGTTCATCAAGCAGAACA |
| | AGTTCATTCCAAGAACCGCTGAAGAGATGGAAAAACATTGGAGAAACTCCTCCAAC |
| | TACAAGAGATTGATTGGTCAAATCGATGAATGCTTCGCTAGAGATTCTGATAAGGC |
| | TAAGCAAGAATTGCAAGATGCTCATACTGCTAAGCAGTCTAAAAGATCAAGACCAT |
| | CTTCTCCATACACCGTTTCTTATGGTATGCAGGTTAAGTACCTGCTGAGAAGAAACA |
| | TCCAAAGAATTAGAAGTGATGCCGGTGTTACCATCTTCCAAGTTGTTGGTAATGCTG |
| | CTATGGCTTTCATTTTGGGTTCTATGTTCTACAAAATCCTGAAGCACGATGATACCGC |
| | TGGTTTTTATTCTAGATCTGGTGCTTTGTTCTTCGCCGTTTTGTTTAATGCTTTCTCCT |
| | GCTTGTTGGAAATCTTCGCATTATACGAAGCCAGACCAATTTCTGAAAAGCACAAG |
| | AGATACAGCTTGTACCATCCTTCTGCTGATGCTTTAGCTTCCGTTATTAGTGAAATTC |
| | CAGCTAAGATCGTTACCGCCATTTGTTTTAACATTGCCCTGTACTTTTTGTGCAACTT |
| | GAGACAATCTGCTGGTGCCTTTTTCTTTTACTTCCTGATGAATATGGTTGCCACCTTT |
| | GCTATGTCCCATATTTTCAGATGTTTGGGTGCTGCTACTAAGACTTTTTCTGAAGCTA |
| | TGGTTCCCTCCTCTTTGTTGTTGTTATCTATGGCTATCTACACCGGTTTCGCTATTCCA |
| | AAGACAAAAATGTTAGGTTGGTCCAAGTGGATCTCCTACATTGATCCATTGTCCTAC |
| | ATCTTCGAATCCTTGATGGTTAACGAATTCCACGGTAGAAAGTTCCAATGCTCTGTT |
| | TATGTTCCAACTGGTCCAGCTTATGCTAATGCTACAGGTACTGAAAGAGTTTGTTCA |
| | GCTGTTGGTGCTGTTCCAGGTCAAGATTATGTTTTAGGTGATGACTACCTGAGGCTG |
| | TCTTACAATTACTTGCACAAACATAAGTGGCGTGGTTTCGGTATTGGTATGGCTTAT |
| | GTTGTTTTCTTCTTGGGTGTTTACTTGGCCTTCACTGAATTCAACGAATCTGCTAGAC |
| | AAAGAGGTGAAGTTTTGGTTTTCACCAGGGAATCTTTGAAGAAGATGAAGAGAGCT |
| | AAGAAGTTGGAATCAGCTAGAGGTGATGCTGAAAATTCTGCTGGTATGGAAACTG |
| | GTATCAACGAGAAGAAGTTGCTTGAAGAATCTGGTGAATCTTCCACCTCATCTTTCC |
| | AAGATGTTAAGTTGTCTCAAACCGAGGCTATTTTTCATTGGAGGAACGTTTGTTTCG |
| | ACGTGAAGATTAAGAAAGAAGATAGGCGTATCTTGAACAACGTTGATGGTTGGGTT |
| | AAGCCAGGTACTTTAACTGCTTTGATGGGTTCTTCTGGTGCTGGTAAAACTACTTTA |
| | TTGGACTGTTTGGCTTCTAGAGTTACTACTGGTGTTGTTACTGGTGATATGTTCGTTA |
| | ACGGTCATTTGAGAGATGCTTCATTCGCTAGATCTATTGGTTACTGTCAACAACAAG |
| | ACTTGCACTTGCAAACTGCTACTGTTAGAGAATCATTGAGATTCGCTGCTTATCTAA |
| | GACAACCAGCTTCTGTTTCTACCGAAGAAAAGAACGATTACGTCGAAGAAATCATC |
| | AGGATCTTGGACATGGAAAAGTACGCTGATGCCGTTGTTGGTGTTGCTGGTGAAGG |
| | TTTGAATGTTGAACAGAGAAAAAGATTGACCATCGGTGTTGAATTGTCTGCTAAAC |
| | CTAAGCTGCTGTTGTTTTTGGATGAACCTACTTCTGGTTTGGACTCTCAAACTGCTTG |
| | GGCTATTTGTCAATTGATGAGAAAGTTGGCTAACCATGGTCAAGCTATTTTGTGCAC |
| | TATTCATCAACCATCCGCTTTGTTGATGCAAGAATTCGATAGACTGCTGTTCTTGAAA |
| | AGAGGTGGTAGAACTGTTTACTTCGGTGATCTAGGTGATGGTTGCTCTAAGATGAT |
| | TGACTACTTTGAATCTCAAGGTGCTCCAAAATGTCCACCAGGTGCTAATCCTGCTGA |
| | ATGGATGTTGGAAGTTATTGGTGCTGCTCCTGGTTCTCATACAGATAAGGATTACG |
| | GCGAAGTTTGGAGAAATTCAGATGAGTATAGAGCCGTTCAAGAGGAATTGGATTG |
| | GATGGAAAGAGAATTGCCAAAAAGACCTTTGGATACTGCTGCAGAACAAACTGAAT |
| | TTGCCACTTCTTTGTTCACCCAGTACAAGTTGGTTACTCAAAGGTTGTTCCAACAGTA |
| | TTGGAGAACACCATCTTACTTGTGGTCCAAGATTATCCTGACCTTGATTTCCCAAATC |
| | TTCATCGGTTTCACGTTCTTCAAGTCCGATTCTACATTGCAAGGTCTGCAAAATCAGA |
| | TGTTGTCCATTTTCATGTTCACCGTCGTTTTCAATCCAACCTTGCAACAATACTTGCCA |
| | TCCTTTGTTTCTCAGAGAGACTTGTACGAAGCTAGAGAAAGACCATCCAGAACATTT |
| | TCTTGGAAGGCTTTCATCTTGTCCCAAATTACTGTTGAAGCCCCATGGAATTTTGCTG |
| | TTGGTACTTTGGGTTTCCTGATCTATTACTACCCAGTGTCTTTTTACAGAAACGCTTC |
| | TTACGCACATCAGTTGCACGAAAGAGGTGCTTTATTTTGGTTATTCTGTACCGCCTTC |
| | TACGTTTACGTTGGTTCTATGGGTCAATTGTGCATTGCTGGTATTGAAGTTGCAGAA |
| | TCTGCAGGTCATATTGCCTCATTGATGTTTACCTTGTCCTTGTCTTTTTGCGGTGTTAT |
| | GGTTACTCCACAAAACATGCCAGGTTTTTGGAAGTTTATGTACAGAGCTTCTCCACT |
| | GACCTACTTCATAGATGGTTTAATGTCTACTGGTTTGGCTAATGCTCCAGCTCATTGC |
| | TCTCATTATGAATTGGTTAGTTTTACTCCACCAGCCGGTCAAACTTGTGGTGAGTAT |
| | ATGGCTCCATATATCAAAATGGCTGGTACTGGTTATTTGACCTCTCCATCAGCTACT |
| | GATAAGTGTTCTTTTTGTCCAGTCTCTACTACCAACGATTACTTGGCTCAAGTTTCCT |
| | CACATTACAAAGATAGATGGCGTAACTGGGGTATTTTCATCTGCTACATTTTCATCG |
| | ACTTTGGCTTCGCAATCTTCTTTTATTGGCTTGCAAGAGTCCCAAAGAAGAAAAACA |
| | GAGTTGCTGATGAACGTGATCCAGATGCTCCAAAGAAATCTGTTGCAGGTACTAAG |
| | AACTAA |
| SEQ ID NO: | MSQEHSDQSLYDGPNKKEIRDLARTLTAASVAVSGNSDAAVNPLAAQPGEPGYNARL |
| 1030 | DPNSDEFSSEAWVRNLSHLTAENPDYYKPFSLGCAWKNLRAYGDSTDVAYQSTVANLP |
| | WKLLQFGYRCVRKSRPSDKFDILKSMDGILNPGELLVVLGRPGSGCSTLLKSISSNTHGF |
| | KVAPESEIRYDGLTPKEIAKHYRGQVVYNAESDVHFPHLSVFDTLKTIALLSTPANRIEGM |
| | DRETYAKHVTEVYMATYGLSHTRNTKVGNDLVRGVSGGERKRVSIAEVAICGSKLQCW |
| | DNATRGLDSATALEFIKALRVNAQMTNTSGVIAIYQCSQDAFDLFDKVCVLHEGYQIYY |
| | GPASEAKQYFEDMGYVSPERQTTADELTAVTNPAERIMNQEFIKQNKFIPRTAEEMEK |
| | HWRNSSNYKRLIGQIDECFARDSDKAKQELQDAHTAKQSKRSRPSSPYTVSYGMQVKY |
| | LLRRNIQRIRSDAGVTIFQVVGNAAMAFILGSMFYKILKHDDTAGFYSRSGALFFAVLFN |
| | AFSCLLEIFALYEARPISEKHKRYSLYHPSADALASVISEIPAKIVTAICFNIALYFLCNLRQSA |
| | GAFFFYFLMNMVATFAMSHIFRCLGAATKTFSEAMVPSSLLLLSMAIYTGFAIPKTKML |
| | GWSKWISYIDPLSYIFESLMVNEFHGRKFQCSVYVPTGPAYANATGTERVCSAVGAVP |
| | GQDYVLGDDYLRLSYNYLHKHKWRGFGIGMAYVVFFLGVYLAFTEFNESARQRGEVLV |
| | FTRESLKKMKRAKKLESARGDAENSAGMETGINEKKLLEESGESSTSSFQDVKLSQTEAI |
| | FHWRNVCFDVKIKKEDRRILNNVDGWVKPGTLTALMGSSGAGKTTLLDCLASRVTTGV |
| | VTGDMFVNGHLRDASFARSIGYCQQQDLHLQTATVRESLRFAAYLRQPASVSTEEKND |
| | YVEEIIRILDMEKYADAVVGVAGEGLNVEQRKRLTIGVELSAKPKLLLFLDEPTSGLDSQT |
| | AWAICQLMRKLANHGQAILCTIHQPSALLMQEFDRLLFLKRGGRTVYFGDLGDGCSK |
| | MIDYFESQGAPKCPPGANPAEWMLEVIGAAPGSHTDKDYGEVWRNSDEYRAVQEEL |
| | DWMERELPKRPLDTAAEQTEFATSLFTQYKLVTQRLFQQYWRTPSYLWSKIILTLISQIFI |
| | GFTFFKSDSTLQGLQNQMLSIFMFTVVFNPTLQQYLPSFVSQRDLYEARERPSRTFSWK |
| | AFILSQITVEAPWNFAVGTLGFLIYYYPVSFYRNASYAHQLHERGALFWLFCTAFYVYVG |
| | SMGQLCIAGIEVAESAGHIASLMFTLSLSFCGVMVTPQNMPGFWKFMYRASPLTYFID |
| | GLMSTGLANAPAHCSHYELVSFTPPAGQTCGEYMAPYIKMAGTGYLTSPSATDKCSFC |
| | PVSTTNDYLAQVSSHYKDRWRNWGIFICYIFIDFGFAIFFYWLARVPKKKNRVADERDP |
| | DAPKKSVAGTKN |
| SEQ ID NO: | ATGTCCGAACACAGATTGCAGAGAAGATTATTGACTCCATTCCTGTCTAAAAAGGTC |
| 1031 | CCTCCAATTCCTGAAGAAGATGAGAGAATCGTTTACCCAAAAAGGCCAAACATCTTC |
| | TCCATCATGTTTTTCTGGTGGTTGGGTCCAGTTATGAGAGCTGGTTACAAAAGAACT |
| | TTGACTGCTCAGGACCTGTACAAGTTGAACGATGATATTAAGGTCGAGTCCATGAC |
| | CAGAAGATTCGAACAATACTTCCAGAACTCTTTGAACAAAGCTATGGCTGCTCATGT |
| | TAGAGCTAAAATGAAGGCTAGAGGTGAAACTGCTGAAACTAACACTGTTGATTTCG |
| | AGAAGGACATGGAAGATTTCGAAGTTCCCAAGATGATTATCGTTAGAGCCATTGCT |
| | AGAACCTTCACTTTTCAATATGGTATGGCTTGCTTGATGATGGCTTTGGGTTCTACT |
| | GGTAATTCTACTACTCCTTTGTTGACCAAGAAGTTGATCAGATTCGTTGAATTGAGA |
| | ACCTTGGGTCTAGAAAAGCACATGAATGCTGGTATTGGTTACGCTATTGGTTCCTCC |
| | ATTATGGTTTTGGTTAACGGTTTGTTCGTTAACCATGCCTTCCATTTGTCTATGTTGA |
| | CTGGTGCTCAAGTTAAGGCTGCTTTGACAAAAGCTTTGTTGGACAAGTCTTTCAGAT |
| | TGTCCGATGCCTCTAAACATGAATTCCCAACTTCTAAGATCACCTCTATGATGGGTG |
| | CTGATTTGGCTAGAATTGATTTTGCCTTGGGTTTCCAACCATTCTTGATTACTTTTCC |
| | AGTTCCAATCGCCATCTCCATTGGTATTTTGTGTCATAATATTGGTGCTCCAGCTATG |
| | GTTGGTGTTGGTTTGATTATTGTGTTCATGGTCTTGACCATGTTCGTCACTGGTAAG |
| | TTGTTTGCTTACAGAAAGACTGCTAACGTTTTCACCGATGCTAGAGTTAACTACGTC |
| | AAAGAAGTCCTGAACAACTTGAAGGTCATCAAGTTTTACTCTTGGGAGATCCCATAC |
| | TCCAAGATTATTACCGAGAACCGTAACAAAGAGATGAACATCGTTTACATCATGCAA |
| | GTCGCCAGAAACATTATTACCTCATTGGGTATGTCTCTGACCCTGTTTTCTTCTTTGG |
| | TTGCATTTTTGGTCTTGTACGCCATTCAAGGTTCTACAAAAGATCCAGCCTCTATCTT |
| | CTCCTCGATTTCTTTGTTTTCTGCCTTGGCTTCTCAGGTTTTCATGATTCCATTGGCTT |
| | TGGCTTCAGGTTCTGATGCTTTGATTGGTGTTACTAGGATTGGTGAATTTTTGGCTG |
| | CTGAAGAAGTTAACCCAAGATCCGCTAGAATTACTGCTTCTGAAAAGACTAAGGCT |
| | GATATGGAAGCTAACAAGTTGGCCTTGTCTATTAAGAACGCTTCTTTCAAGTGGGA |
| | AACCTTTGGTGAACAAGGTTCCCATACAAACAACACTCATACCTTGTCCGAAAAAGA |
| | AAACTTCACCGCTTCAGAGAAAGAGCTGTACAACAAATTGGAAAAACACATGACCA |
| | ACAAGTCCATCTCCACCATTTCTCATGAATCTGCTTCATCTCCAGATCATGGTCCTTTT |
| | TCTGATTCTTCTTCATTGGCCGAACAAAATTTCCCAGGTTTGGAATCCATTGATTTGG |
| | ATGTTAAGAAGGGTGAATTCGTTGTTATCACTGGTTTGATCGGTTCTGGTAAAACCT |
| | CTTTGTTGAATGCTATGGCCGGTTTCATGAAGAGAGTTTCTGGTTCTGTTGATGTCA |
| | ACGGTTCTTTGTTGTTGTGTGATCAACCATGGATTCAAAACGCTACCGTTAGAGAAA |
| | ACATCTTGTTTGGTTTGCCAATGGATGATGCCAAGTACAAGAATGTTGTTTACGCTT |
| | GCTCTTTGGAATCTGACTTGGAAATTTTACCTGCTGGTGATTTGACCGAAATTGGTG |
| | AAAGAGGTATTACTTTGTCTGGTGGTCAAAAGGCTAGAATCAATTTGGCAAGAGCT |
| | GTTTATGCCGATATGGACATTATCTTGTTGGATGATGTTTTGTCCGCTGTTGATGCA |
| | AGAGTTGGTAAACATATTATGGCCCAATGCATCATGGGTATCTTGAAGGATAAGAC |
| | CAGAATTTTGGCTACCCACCAATTGTCATTGATTGGTTCTGCTGATAGGATCGTTTTC |
| | TTGAATGGTAACGGTTCCATTTCCGTTGGTACTTTCGAAGAATTGAAGTCCAAGAAC |
| | GAAGCCTTCTCTCATTTGATGGCCTTTAATGCTGATTCCCATGATTCTGAGGATGAG |
| | AAAGAAGAAGAAGTCGAGGACGAGGAAGAAAGAGAAGCTGTAAAAGAATTGGTT |
| | GAAAGGCAAGTCACCAGATACAAATCTAGAGCTGACGAAGAAGAAATTAGGCACG |
| | ATTATGAAGCTAACGCTGATAAGGATGGTAGATTGATCGATGATGAAGAAAAGGC |
| | TGAAAACGGTATCAAGTTCGAAGTCTACAAGAACTACTTGTCCATTGGTTCCGGTAT |
| | TTTCAAGCACTATTCATCCGTTCCTATCGTCATCGTTTTGATTGCTTTGTCTGTTTTCT |
| | GTCAGCTGTTCACTAATACCTGGTTGTCTTTCTGGTCCGAAAAGAAGTTTGCTCATA |
| | AGTCTAACGGTTTCTACATCGGCTTTTACGTTATGTTCACATTCTTGGCTGCTATTTTC |
| | TTGACCTTGGAATTCGTTTTGTTGGCCTACTTGACTAACAACGCTTCTACTAAGTTGA |
| | ACTTGATGGCTGTTCAAAAGGTTTTGAGAGCCCCAATGTCTTACATGGATGTTACTC |
| | CAATGGGTAGAATCTTGAACAGATTCACTAAGGATACCGATACCTTGGATAACGAA |
| | ATCGGTAACCAGATTAGAATGCTGACCTACTTCTTCTCTAACATCGTTGGTGTTTTGG |
| | TTTTGTGCGTTATCTACTTGCCATGGTTTGCTATTGCTATTCCATTCTTGGGTTTTATC |
| | TTCGTTGCCATCGGTAATTTCTATCAAGCTTCTGCTAGAGAGATCAAGAGATTGGAA |
| | GCAGTTCAAAGATCCTTCGTCTACAACAACTTCAACGAAACATTGTCTGGTATGAAG |
| | ACCATTAAGGCTTACCAAGCTGAAGAAAGGTTCTTGGAAAAGAACGATACCTACGT |
| | CAACAACATGAACGAAGCTTACTACATCACCATTGCTAATCAGAGATGGTTGTCCAT |
| | CCATTTGGATTTTGTTGCTGCTGGTTTCGCCTTGATTATTTGCTTTTTGTGTGTGTTCA |
| | GGGTTTTCAAGATTTCCGCTGCTTCAGTTGGTCTGTTGTTGTCTTACGTTTTACAAAT |
| | TGCCGGTCAGTTGTCCATGTTGGTTAGAACTTATACCCAAGTCGAAAACGAGATGA |
| | ACTCCGTTGAAAGAATTTGTGAATACGCCTTGTATTTGCCAGAAGAAGCTCCATACA |
| | ACATCTCAGAAACAAAACCAGCTGATTCTTGGCCAGAACATGGTGCTGTTAGATTC |
| | GAAAATGTTTCCTTGGCTTATAGACCAGGTTTGCCATTGGTTTTGAAAAACTTGTCT |
| | GCCGACATTAAGCCCAAAGAAAAGATTGGTATATGTGGTAGAACTGGTGCCGGTA |
| | AATCTTCTATTATGACTGCCTTGTACCGTCTGTCTGAATTGAATGGTGGTAAGATTG |
| | AAATCGATGGTGTCGACATTTCTAAGTTGGGTTTGAACGATTTGAGGTCCAAGTTGT |
| | CTATCATTCCACAAGATCCAGTTTTGTTCAGGGGTACTATTAGAAAGAACTTGGATC |
| | CCTTCAACTTGAGTTCTGAAGATGTATTGTGGTCTGCTTTGCGTAGAGCAGGTTTGA |
| | TTGAAGAATCCAAGTTGGAATTTGTCAAGACCCAAAAACCAGATGCTGAAAACTTG |
| | CATAAGTTCCACTTGGATAGAGAAGTCGAAGATGAAGGTTCCAACTTTTCATTGGG |
| | TGAAAGACAGTTGATTTCCTTCGCTAGAGCAATGGTTAGAGACTCTAAGATCTTGAT |
| | TTTGGATGAAGCCACTTCCTCCGTTGATTACGAAACTGATTCTAAGATTCAGTCCAC |
| | CATCGTCAGAGAATTTGGTAACTGTACCATTTTGTGCATTGCCCACAGATTGAGAAC |
| | TATCTTGAACTACGATAGGATCTTGGTATTGGATAGGGGTGAGATCAAAGAATTCG |
| | ATACTCCATGGAACTTGTTCCAGTCAGAAGATGGTATCTTTAAGCAGATGTGCGAA |
| | AGATCCAACATCACCAAGGATGATTTTAAGCACTGA |
| SEQ ID NO: | MSEHRLQRRLLTPFLSKKVPPIPEEDERIVYPKRPNIFSIMFFWWLGPVMRAGYKRTLTA |
| 1032 | QDLYKLNDDIKVESMTRRFEQYFQNSLNKAMAAHVRAKMKARGETAETNTVDFEKD |
| | MEDFEVPKMIIVRAIARTFTFQYGMACLMMALGSTGNSTTPLLTKKLIRFVELRTLGLEK |
| | HMNAGIGYAIGSSIMVLVNGLFVNHAFHLSMLTGAQVKAALTKALLDKSFRLSDASKH |
| | EFPTSKITSMMGADLARIDFALGFQPFLITFPVPIAISIGILCHNIGAPAMVGVGLIIVFMV |
| | LTMFVTGKLFAYRKTANVFTDARVNYVKEVLNNLKVIKFYSWEIPYSKIITENRNKEMNI |
| | VYIMQVARNIITSLGMSLTLFSSLVAFLVLYAIQGSTKDPASIFSSISLFSALASQVFMIPLA |
| | LASGSDALIGVTRIGEFLAAEEVNPRSARITASEKTKADMEANKLALSIKNASFKWETFGE |
| | QGSHTNNTHTLSEKENFTASEKELYNKLEKHMTNKSISTISHESASSPDHGPFSDSSSLAE |
| | QNFPGLESIDLDVKKGEFVVITGLIGSGKTSLLNAMAGFMKRVSGSVDVNGSLLLCDQP |
| | WIQNATVRENILFGLPMDDAKYKNVVYACSLESDLEILPAGDLTEIGERGITLSGGQKAR |
| | INLARAVYADMDIILLDDVLSAVDARVGKHIMAQCIMGILKDKTRILATHQLSLIGSADRI |
| | VFLNGNGSISVGTFEELKSKNEAFSHLMAFNADSHDSEDEKEEEVEDEEEREAVKELVER |
| | QVTRYKSRADEEEIRHDYEANADKDGRLIDDEEKAENGIKFEVYKNYLSIGSGIFKHYSSV |
| | PIVIVLIALSVFCQLFTNTWLSFWSEKKFAHKSNGFYIGFYVMFTFLAAIFLTLEFVLLAYLT |
| | NNASTKLNLMAVQKVLRAPMSYMDVTPMGRILNRFTKDTDTLDNEIGNQIRMLTYFF |
| | SNIVGVLVLCVIYLPWFAIAIPFLGFIFVAIGNFYQASAREIKRLEAVQRSFVYNNFNETLS |
| | GMKTIKAYQAEERFLEKNDTYVNNMNEAYYITIANQRWLSIHLDFVAAGFALIICFLCVF |
| | RVFKISAASVGLLLSYVLQIAGQLSMLVRTYTQVENEMNSVERICEYALYLPEEAPYNISE |
| | TKPADSWPEHGAVRFENVSLAYRPGLPLVLKNLSADIKPKEKIGICGRTGAGKSSIMTAL |
| | YRLSELNGGKIEIDGVDISKLGLNDLRSKLSIIPQDPVLFRGTIRKNLDPFNLSSEDVLWSA |
| | LRRAGLIEESKLEFVKTQKPDAENLHKFHLDREVEDEGSNFSLGERQLISFARAMVRDSKI |
| | LILDEATSSVDYETDSKIQSTIVREFGNCTILCIAHRLRTILNYDRILVLDRGEIKEFDTPWN |
| | LFQSEDGIFKQMCERSNITKDDFKH |
| SEQ ID NO: | ATGGCCGAAGATGAGTCCTCCTCAATTCAAGTTTTTGAGAAAGAAAAGAACGGCAA |
| 1033 | GTCCCATGCCATGATTGAAGAAGCTCAACCAGTTGAGTATATGAAGCAAAGAAGGC |
| | TGTTCTCCTTCCTGTTCTCTAAAAAGGTTCCACCAATTCCAACTCCAGACGAAAGAAA |
| | ACCATATCCATTCAGAAAGGCCAACATCATCTACAAGATTTTCTTTTGGTGGCTGAT |
| | GCCATTGATGAACACTGGTTACAAAAGAACCTTGCAACAAGAGGATTTGTGGTACT |
| | TGGATGGTGATTTGAAGATCGAAGAATATTACGCCATCTTCGAAAAGAGATTGGCT |
| | AAGAGAACTCAAAAGGCTAGAGAAGCTCATTTGAAGTTGCTGGAAGAGAAGAAGA |
| | AAAACGGTACTTTCGATCCAAACGAGGACAATGAATTTGAATTCGAATACCCCAGA |
| | TACTCCTTGGTTTGGGCTTTGTTTGATACTTTCAAGTGGGAGTACTCTCTGTCCATAG |
| | TTTTTGTTGCTTTGGCTGATGTTGGTTTCACTTTGAATCCTTTGTTGTCCAAGGCTTTG |
| | ATCGATTTCGTTGAAGATAGAGTCTTGGGTTACAAGACCAACATTGGTCATGGTGTT |
| | GGTTATGCTATTGGTTGTTCTGCTTTGGTTTCCGTTTCTGGTATTTTGATCAACCACTT |
| | CTTCAACTTGTCTACCCAAGTTGGTGCTAAATCTAAAGCTACTTTGACCAAGGCTAT |
| | GTTGGAGAAGTCTTTTAAGTTGAACGCTAAGGGTAGACATAACTACCCAGCTTCTA |
| | AGATTACTTCCATGTTGGGTACTGATTTGTCCAGAGTTGACTTAGGTATTGGTTTCC |
| | AACCTATTGCTATCGTGTTTCCAATTCCAGTTGCTATTTCCATTGCCTTGTTGATCGTT |
| | AATATCGGCGTTTCTTCTTTGGCCGGTATTGGTATTTTCATTATCTCCACCATTATTAT |
| | CGCTCTGGCTACCAAGAAGTTGTTCTCTTACAGAAAGAAGATCACCAAGTTCACCGA |
| | CTCTAGAATCAATTACATGAAGGAACTGTTGAACAACGTCAGGATCATCAAGTATTA |
| | TTCTTGGGAGCCATCCTACAAAGAAACCATTGCTGATGTTAGAACCTCCGAGATGTA |
| | CAACATTTTCAAGTTGCAGATCCTGAGGAACTTCTTGACTGCTTATGCTGTTTGTTTG |
| | CCACAGATCTCTTCTATGGTTTCCTTCTTGGTTATGTACGCCGTTGATAAGAATAGAT |
| | CCGCTGGTCAAATTTTCGCCTCTTTGTCTTTGTTCAACGTCTTGTCCCAACAGATTAT |
| | GATGTTGCCATTGGCTTTGGCTACTGGTTCTGATGCTTTAGTTGGTATCGATAGAGT |
| | TAGAGGTTTGTTGCAATCTGGTGAAGATGATCCAAAGGACAGAGAATCTTCTTACG |
| | TTGATGTTGACGAACTGATCGAAAAGAAGTTGGCCATCTCTGTTAGAAACGCTACTT |
| | TCCAATGGAAAACCTTCGAACAAATCGACGAATCTGTCTCCCCATCTAAAGAAGAA |
| | GAGGAAAAAGAAAAGCAGATCGAGAGAGAGGAAGAACGTTTGAACAACATTAAC |
| | AAGCAGTTGTCCGGTAACTTCGACCAATCTTCTTCATTGTCTGTTAAGCACACTAAGT |
| | TCCCAGGTTTGAAGCACTTGGATTTCGATATTAAGCAGGGTGAGTTCATTATCATCA |
| | CCGGTATTATTGGTTCCGGCAAGTCATCTTTGTTGAATGCTTTGGCAGGTTTCATGG |
| | ACAAAGAAGAGGGCGAATTGAAAATCAACGGTTCTTTGTTGTTGTGTGGTTACCCA |
| | TGGATTCAAAATGCTCCAGTCAAAGAGAACATCTTGTTCGATTCTGAATACGACGA |
| | GAAGAAGTACAAGGATACAATCTACGCTTGTTCCTTGGATGCCGATTTGGATATTTT |
| | GCCAGCTGGTGATAGAACCGAAATTGGTGAAAGAGGTATTACTTTGTCTGGTGGTC |
| | AAAAGGCAAGAATCAACTTGGCTAGAGCTGTTTACGCTGTTAACGATATCATCTTGT |
| | TGGACGATGTTTTGTCTGCTGTTGATGCTAGAGTTGGTAAGCACATTATGGATAACT |
| | GTTTCATGGGTCTGTTGAAGGATAAGACCAGAATTTTGGCTACCCACCAATTGTCTA |
| | TGATTAACTCTGCTGATAGGGTCATCTTCTTGAATGGTGATGGTACTGTTGATATCG |
| | GTACTCCAGATGAGTTGTTGAAATCTAATGCTGCCTTCCTGAACCTGATGGAATTTT |
| | CTAATGACGAAAAGAACACCGAAGAGGAACAAAAAGAAATGAACGATGAAGAGG |
| | ACAAAGAACTGAAGAGACAAATGACCGAAAAGTCCTTGTTGAACGATAACGACGA |
| | AGATGACGAAGAATCCAGAAAGGATTTCACTTCTAAAACCGGTGAAGCCCAATTGA |
| | TCCAAAAAGAAGAGAGAGCCATTAACGGCATCTCATTCTCTATCTATAAGAACTACG |
| | TTATGGCTGGTTCCGGTGCTTTGAAAGCTGGTATGACTCCAGTATTCTTTTTCTTCGT |
| | TATTCTGGCCACTTTCTTCCAGTTGTTCACTAATACTTGGTTGTCTTTCTGGACCGAA |
| | GAAAAGTTTCCAGGTAGATCTTCTGGTTTCTACATTGGCTTGTACGTTGCTTTCACTT |
| | GCTTGACCATTATCTTCGTTTCTACCGAGTTTTCCCTGATCGTTTTCATTACCAACAA |
| | GGCCTCTAAGCTGTTGAATATTGCTGCTGTTACCAACTTGTTGCATGCTCCAATGTCT |
| | TTCTTTGATACCACTCCAATTGGTAGGATCTTGAACAGATTCACTAAGGATACAGAT |
| | GCCTTGGATAACGAAATCTCTCAACAATTGAGGCTGTTCATCTACCCAACTGCTAAT |
| | GTTTGTGGTGTCTTGATTCTGTGCATTATCTACTTGCCATGGTTCGCTATTGCTGTTC |
| | CATTCTTAGTTGCTTTGTTCATTGGTTTCGCTAACTTCTATCAAGCCTCCTCTAGAGA |
| | AATCAAGAGATTAGAAGCTTTGGCCAGGTCTTTCGTTTACAACAACTTTAACGAAAC |
| | CCTAGGTGGTATGACCACCATTAAGAGTTTTAAGGCTGAATCCAGGTTCCTGATCAA |
| | AAACAACTTGTACATCAACAGGATGAACGAGGCCTACTTTATCTCCTTGTCTAATCA |
| | AAGATGGTTGGGTATCCATTTGGATTTGGTTGCTTCAGCTTTCGCTTTGATTATAGC |
| | CTTGTTGTCCGTTACCAGACAATTCCAAATTTCTGCTGCTTCTGTTGGTTTGTTGGTG |
| | TCATACGTTATGCAAATTGCTGGTCAGTTGTCGTTGTTGATTAGAGCTATGACTCAA |
| | GTCGAAAACGAGATGAACTCTGTTGAAAGATTGGATTACTACGCCTTCCATTTGCCA |
| | TCTGAAGCACCATTTGATATTCCAGAAACTGCTCCACCACCAACATGGCCACAACAT |
| | GGTGTAGTAGAATTCAAGAATGTCTCCTTGGCTTATAGACCAGGTTTGCCATTAGTC |
| | CTGAACAATATCTCATTTTCCGTTAAGGCCGGTGAAAAGATAGGTATTTGCGGTAG |
| | AACTGGTGCTGGTAAATCTTCTATTATGACTGCCTTGTACAGATTGGCTGAATTGGC |
| | TAATGGTGAGATTAACATCGACGGTATTAACATTGCCAAGATCGGTTTGAACTCCTT |
| | GAGATCCAAGTTGTCCATTATTCCACAAGATCCAGTTTTGTTCAGGGGTAACATTAG |
| | AAAGAATCTGGACCCTTTCAACAAGCACAACGATGATGAATTGTGGGGTGCTTTAA |
| | GAAGGTCTGGTCTAATTGAAGAATCCGAGTTGTCTAAGGTTAAGTGTCAAGCTTTG |
| | ACTGATCCACAATTGCACAAGTTTCACTTGGATCAGGTTGTAGAAGATGATGGCTCT |
| | AATTTCTCCTTGGGTGAAAAACAATTGATTGCATTGGCAAGAGCCGTTGTCAGAAA |
| | CTCCAAGATTTTGATTTTGGATGAAGCCACCTCCTCCGTTGATTACGAAACTGATGC |
| | TAAGATTCAAAAGACCATCGTGCAAGAATTCTCTTCCTGTACCATTTTGTGCATTGCC |
| | CATAGATTGAAAACCATCGTTGACTACGATAGAATCTTGGTTTTGGATAAGGGTCA |
| | AGTCCAACAATTCAATACTCCATGGGTCCTGTTTAACAAAGAAGGTATCTTCCAAAA |
| | GATGTGCGAGAGATCTAAAATTACCGCTTTGGACTTCAACCGTAAGAGCTAA |
| SEQ ID NO: | MAEDESSSIQVFEKEKNGKSHAMIEEAQPVEYMKQRRLFSFLFSKKVPPIPTPDERKPYP |
| 1034 | FRKANIIYKIFFWWLMPLMNTGYKRTLQQEDLWYLDGDLKIEEYYAIFEKRLAKRTQKA |
| | REAHLKLLEEKKKNGTFDPNEDNEFEFEYPRYSLVWALFDTFKWEYSLSIVFVALADVGF |
| | TLNPLLSKALIDFVEDRVLGYKTNIGHGVGYAIGCSALVSVSGILINHFFNLSTQVGAKSK |
| | ATLTKAMLEKSFKLNAKGRHNYPASKITSMLGTDLSRVDLGIGFQPIAIVFPIPVAISIALLI |
| | VNIGVSSLAGIGIFIISTIIIALATKKLFSYRKKITKFTDSRINYMKELLNNVRIIKYYSWEPSYK |
| | ETIADVRTSEMYNIFKLQILRNFLTAYAVCLPQISSMVSFLVMYAVDKNRSAGQIFASLSL |
| | FNVLSQQIMMLPLALATGSDALVGIDRVRGLLQSGEDDPKDRESSYVDVDELIEKKLAIS |
| | VRNATFQWKTFEQIDESVSPSKEEEEKEKQIEREEERLNNINKQLSGNFDQSSSLSVKHT |
| | KFPGLKHLDFDIKQGEFIIITGIIGSGKSSLLNALAGFMDKEEGELKINGSLLLCGYPWIQN |
| | APVKENILFDSEYDEKKYKDTIYACSLDADLDILPAGDRTEIGERGITLSGGQKARINLARA |
| | VYAVNDIILLDDVLSAVDARVGKHIMDNCFMGLLKDKTRILATHQLSMINSADRVIFLN |
| | GDGTVDIGTPDELLKSNAAFLNLMEFSNDEKNTEEEQKEMNDEEDKELKRQMTEKSLL |
| | NDNDEDDEESRKDFTSKTGEAQLIQKEERAINGISFSIYKNYVMAGSGALKAGMTPVFF |
| | FFVILATFFQLFTNTWLSFWTEEKFPGRSSGFYIGLYVAFTCLTIIFVSTEFSLIVFITNKASK |
| | LLNIAAVTNLLHAPMSFFDTTPIGRILNRFTKDTDALDNEISQQLRLFIYPTANVCGVLILC |
| | HYLPWFAIAVPFLVALFIGFANFYQASSREIKRLEALARSFVYNNFNETLGGMTTIKSFKA |
| | ESRFLIKNNLYINRMNEAYFISLSNQRWLGIHLDLVASAFALIIALLSVTRQFQISAASVGL |
| | LVSYVMQIAGQLSLLIRAMTQVENEMNSVERLDYYAFHLPSEAPFDIPETAPPPTWPQ |
| | HGVVEFKNVSLAYRPGLPLVLNNISFSVKAGEKIGICGRTGAGKSSIMTALYRLAELANG |
| | EINIDGINIAKIGLNSLRSKLSIIPQDPVLFRGNIRKNLDPFNKHNDDELWGALRRSGLIEE |
| | SELSKVKCQALTDPQLHKFHLDQVVEDDGSNFSLGEKQLIALARAVVRNSKILILDEATSS |
| | VDYETDAKIQKTIVQEFSSCTILCIAHRLKTIVDYDRILVLDKGQVQQFNTPWVLENKEGI |
| | FQKMCERSKITALDFNRKS- |
| SEQ ID NO: | ATGTCCAACTCCGCCTACGATATTGAAGATCATCCTGAAGAGGTTAACAAGTACGAT |
| 1035 | GGTTACAACAACGCTGTTGATTCCGAAGTTCAAAGATTGGCTAGACAAATCACCCA |
| | AAACTCCCAATTGTCTTTTCAAGATGACGGTTTTAAGTTGGCTCCAGGTGAATCTAA |
| | TATCGACGGTTTGTCTAGAGTTTCTACTATTGCTCCTGGTGTTAACCCAATGCAAAAC |
| | GTTGAAGAATTGGACCCAAGATTGGATCCTAACTCTGAAGAATTCCAATCCAGATA |
| | CTGGATCAAGAACTTCAAGGCTTTGATGGATAAGGATCCAGATCACTACAAGAACT |
| | ACTCATTGGGTGTTACCTTCAAGAATTTGAGAGCTTCTGGTGAAGCTTCTGATGCTG |
| | ATTATCAAACCACCATTATTAACGCCCCATTCAAGATTGCTAAGCAATATGCTAAAG |
| | CCGTGTTCTCTACTAGATCTGCTAAACAAGCTAACAGGTTCGACATCTTGAAGTCTTT |
| | GGATGGTATAGTTAGACCAGGTGAAGTTTTGGTTGTTTTGGGTAGACCTGGTTCTG |
| | GTTGTACTACTTACTTGAAATCCATTGCCTCTAACACCCATGGTTTTAAGATAGGTCA |
| | AGAGTCCGAAATGTCTTACGAAGGTTTGACCCAAAAAGAGATCAAAAAGCACTTTA |
| | GAGGTGAGGTTGTTTACAACGCCGAATCCGATATTCATTTCCCACATTTGACTGTTT |
| | GGCAAACTTTGACTACTGCTGCTAAATTCAGAACCCCAGAAAACAGAATTCCAGGT |
| | ATCTCAAGAGAAGATTACGCTAACGCTTTGACCGAAGTTTTTATGGCTACTTATGGT |
| | TTGTCCCATACCAAGAATACCAAGGTTGGTTCAGAATTGGTTAGAGGTGTTTCTGGT |
| | GGTGAAAGAAAGAGAGTTTCAATTGCCGAAGTTTCTTTAGCTGGTGCTAGATTGCA |
| | ATGTTGGGATAATGCTACTAGAGGTTTGGATGCTGCTACTGCTTTGGAATTCATTAG |
| | AGCTTTAAGAACCTCCGCTGATGTTTTGGATACAACTGCTTTGATTGCTATCTACCAA |
| | TGTTCCCAAGAAGCCTACGATTTGTTCGATAAGGTTTCTGTCTTGTACGAGGGTTAC |
| | CAAATTTTCTTTGGTAGAGCTGATAAGGCCAAAGAATACTTCATTAACATGGGTTGG |
| | GAATGCCCACCAAGACAAACTACAGCTGATTTCTTGACTTCTGTTACCTCTCCAAGA |
| | GAAAGAGTTCCAAGAGCTGGTTTTGAAAAGAAGGTTCCAAGAACTCCATCTGAATT |
| | TGCTACTTATTGGAAAGCTTCTCCAGAGTACAAGGCATTGATTGCCGAAATTGATGA |
| | ATCCTTGGCTGCCAATCAAAAGTCCGAATTGAAGGATTTGATCTACGATGCTAAGG |
| | CCTCCAGACAATCTAAAAGAATGAGAAAGACTGACCCCTACACCGTTTCTATTTCAT |
| | TGCAAACTAAGTACCTGTTGGAGAGAGAAGTCTACAGGATTAAGAACAACTTTGGT |
| | TTCCATGGCTTCTCCGCTATTGCTAATTCTTTGATGGCTTTGGTTTTGGCCTCCATCTT |
| | TTACAACATGTCTAAGACTACCGAGTCCTTCTATTCTAGAGGTGCTGCTATGTTTTTC |
| | GCTTGTTTGTTTAACGGTTTCCAGTCCTTCTTGGAGATCTTGTCTTTGTTTGAAGCCA |
| | GACCAATTATCGAAAAGCACAAACAATACGCCTTGTATCATCCAGCTGCTGAAGCTT |
| | TGGCTTCTGTTATTTCTCAATTGCCTTTTAAGGCCTTCTCCTCCTTGATGTTTAACCTG |
| | ATCTATTACTTCATGGTCAACTTCAGAAGAGATCCAGGTAGATTCTTCTTCTACTTGT |
| | TGGCTAACGTTACTTCTACCTTCACCATGTCTCATTTCTTCAGATTGATCGGCTCTAT |
| | GTCATCTACTTTGCCACAAGCTTTGGTTCCAGGTCATATAGTTTTGTTGGGTTTGTCC |
| | ATGTTCGTCGGTTTTACTATTCCAGTCAACTACATGTTAGGTTGGTGCAGATGGATT |
| | AACTACATTAACCCATTGGCTTACGCTTTCGAAGCTTTAATGGCTAACGAATTCCAT |
| | GGTTTGAGATACGCTTGTTCTGCATTTTTGCCAGATAACCCAGATAATCATCCAGAT |
| | TGGCCAGCTAAATCTTGGATCTGTAATGCTGTTGGTGCTGTTGCCGGTGAAGCTACT |
| | GTTTCAGGTGATGCTTACTTAGATGCTGCTTACTCCTACTCTAATTCTCATAAGTGGC |
| | GTAACTGGGCTATTACTTTTGCCTTCTGTATTTTCTTCTTGGCCACCTACATGATTTTC |
| | GCTGAGTATAATGAATCCGCCAAGCAAAAGGGTGAAATCTTGTTGTTTCAAAGGTC |
| | CACCTTGAAGAAGTTGAAGAAAGAACATAAGGCTGCCAAGAACGATATCGAAGGT |
| | GGTAAATTGAGAGACATCACCGAACAAGATCACGACGAAGAATCTGAACAACACG |
| | TTGATGCTATTCAAGCCGGTAAGGATATTTTCCATTGGAGAGATGTTCATTACACCG |
| | TCAAGATTAAGTCCGAGTACAGGGAAATTTTGTCTGGTGTTGATGGTTGGGTTAAG |
| | CCAGGTACTTTGACTGCCTTGATGGGTGCTTCAGGTGCTGGTAAAACTACTTTGTTG |
| | GATGTCTTGGCTAACAGAGTTACTATGGGTATCGTTACTGGTAACATGTTCGTTAAC |
| | GGTAGATTGAGGGATTCCTCATTCCAAAGATCTACTGGTTACGTTCAACAACAGGA |
| | CTTGCATTTGCCAACTGCTACTGTTAGAGAAGCCTTGAGATTTTCTGCTTACTTGAGA |
| | CAACCAGCTGAAGTCTCTAAAGCTGAAAAGGATGACTATGTCGAAGAGGTCATTAA |
| | GATCTTGGACATGCAAAAGTATGCTGATGCTGTTGTTGGAGTTGCTGGTGAGGGTT |
| | TGAATGTTGAACAAAGAAAAAGATTGACCATCGGTGTTGAATTGGCTGCTAAGCCT |
| | AAGTTGTTGTTGTTTTTCGATGAACCTACCTCCGGTTTGGATTCTCAAACTGCTTGGT |
| | CTATTTGCCAGTTGATGAGAAAGTTGGCTAATCACGGTCAAGCTATTTTGTGCACTA |
| | TTCATCAACCATCCGCCATCTTGATGCAAGAATTCGATAGATTGCTGTTCTTAGCCAA |
| | AGGTGGTAGAACTGTTTACTTTGGTGACTTAGGTGAAGGTTGCCAAACCTTGATTG |
| | ATTACTTTGAAAAGTACGGTGCTCCAAAGTGTCCTCCTGAAGCTAATCCAGCTGAAT |
| | GGATGTTGCATGTTATTGGTGCTGCTCCAGGTTCTCATGCTAATCAAGATTATCATC |
| | AAGTCTGGTTGGATTCCGCTGAAAGAAGAGATGTATTGTCTGAATTGGACAGGATG |
| | GAAAAAGAGTTGGTTAACATTCCAGTTGACGATTCCGTTTCTCACTCAGAATTTGCT |
| | GCACCATTTTGGGTTCAATTGACTGTTGTTACTGCCAGAGTGTTCCAACAATTTTGG |
| | AGAACACCATCTTACATTTGGGCCAAGATGTTTTTGTCCGTCGTTTCCTCTTTGTTTA |
| | TCGGCTTTATCTTCTTCAGGTCGAAGAACTCTATCCAAGGCTTGCAAAATCAAATGT |
| | TCGCCTTGTTCATGTTCCTGACCATTTTTAACCCACTGCTGCAACAAATTTTGCCCACT |
| | TTTGTTTCTCAGAGGGACTTGTACGAAACTAGAGAAAGACCAGCTAAGACCTTTTCA |
| | TGGAAGGCTTTCATTATCGCTCAATTCATAGCTGAAGCTCCATGGAATGCTTTTGTT |
| | GGTACAGTTGGTTTCTTCTGCTTTTATTACCCAGCTGGTTTCTACAGAAATGCCGAAC |
| | CATATGATGAAGTCAATGGTAGAGGTGCATATGGTTGGTTCTTTGCTGTTTTGTTCT |
| | TCATCTACATTGGTTCTATGGCCCATATGTTGATTGCCCCTTTACAAATTGCTGATTC |
| | TGCTGGTAATTTGGGCTCTTTGTTGTTCACTATGTGTTTGACTTTCTGCGGTGTTTTG |
| | GTTACTAAGGATGCTTTGCCAGGTTTTTGGGTTTTCATGTATAGAGTCTCTCCATTCA |
| | CCTACTTCATCGAAGGTTATTTGACTAATGCTTTGGCCCATAACAAGATCGTCTGTTC |
| | AGAAGAAGAGTTCAGAGTTTTGTCTCCACCAGATGGTTTGACTTGCCAAGATTATTT |
| | GGGTGACTACATTTCTAAAGCCGGTACAGGTTACTTGCAAGATCCAGAAGCAACTG |
| | GTTCTTGTCAATTTTGTCCAATGTCTAAAACGGACGACTTCTTGGCTCAAGTTCAATT |
| | GGATTATGGTAACAGATGGCGTGATGTCGGTATTTTCATTGCCTTCATTTTCATCAA |
| | CTTGTTCTTCGCCGTCCTGTTTTATTGGTTGGCTAGAGTTCCTAAGAAGTCCGATAG |
| | AGTTAGTACTGAACAACCTGAAGGTGCTGTTAATATGGGTGCTGAATTAGAAAAGA |
| | AAGCCGCCTTGCATAGAACTGCTACAAATGCTGCTTCACAAGCTGCTTCTCAAGGTT |
| | ATGCTCCACAAGTCTATAACGAAAAAGTCGGTTCTGAAGAAGGCTCCTTGGATAAG |
| | GTTGATAACTCTGATTCTTCCAGGTAA |
| SEQ ID NO: | MSNSAYDIEDHPEEVNKYDGYNNAVDSEVQRLARQITQNSQLSFQDDGFKLAPGESNI |
| 1036 | DGLSRVSTIAPGVNPMQNVEELDPRLDPNSEEFQSRYWIKNFKALMDKDPDHYKNYSL |
| | GVTFKNLRASGEASDADYQTTIINAPFKIAKQYAKAVFSTRSAKQANRFDILKSLDGIVRP |
| | GEVLVVLGRPGSGCTTYLKSIASNTHGFKIGQESEMSYEGLTQKEIKKHFRGEVVYNAES |
| | DIHFPHLTVWQTLTTAAKFRTPENRIPGISREDYANALTEVFMATYGLSHTKNTKVGSEL |
| | VRGVSGGERKRVSIAEVSLAGARLQCWDNATRGLDAATALEFIRALRTSADVLDTTALI |
| | AIYQCSQEAYDLFDKVSVLYEGYQIFFGRADKAKEYFINMGWECPPRQTTADFLTSVTS |
| | PRERVPRAGFEKKVPRTPSEFATYWKASPEYKALIAEIDESLAANQKSELKDLIYDAKASR |
| | QSKRMRKTDPYTVSISLQTKYLLEREVYRIKNNFGFHGFSAIANSLMALVLASIFYNMSK |
| | TTESFYSRGAAMFFACLFNGFQSFLEILSLFEARPIIEKHKQYALYHPAAEALASVISQLPF |
| | KAFSSLMFNLIYYFMVNFRRDPGRFFFYLLANVTSTFTMSHFFRLIGSMSSTLPQALVPG |
| | HIVLLGLSMFVGFTIPVNYMLGWCRWINYINPLAYAFEALMANEFHGLRYACSAFLPD |
| | NPDNHPDWPAKSWICNAVGAVAGEATVSGDAYLDAAYSYSNSHKWRNWAITFAFCI |
| | FFLATYMIFAEYNESAKQKGEILLFQRSTLKKLKKEHKAAKNDIEGGKLRDITEQDHDEES |
| | EQHVDAIQAGKDIFHWRDVHYTVKIKSEYREILSGVDGWVKPGTLTALMGASGAGKTT |
| | LLDVLANRVTMGIVTGNMFVNGRLRDSSFQRSTGYVQQQDLHLPTATVREALRFSAYL |
| | RQPAEVSKAEKDDYVEEVIKILDMQKYADAVVGVAGEGLNVEQRKRLTIGVELAAKPKL |
| | LLFFDEPTSGLDSQTAWSICQLMRKLANHGQAILCTIHQPSAILMQEFDRLLFLAKGGRT |
| | VYFGDLGEGCQTLIDYFEKYGAPKCPPEANPAEWMLHVIGAAPGSHANQDYHQVWL |
| | DSAERRDVLSELDRMEKELVNIPVDDSVSHSEFAAPFWVQLTVVTARVFQQFWRTPSY |
| | IWAKMFLSVVSSLFIGFIFFRSKNSIQGLQNQMFALFMFLTIFNPLLQQILPTFVSQRDLY |
| | ETRERPAKTFSWKAFIIAQFIAEAPWNAFVGTVGFFCFYYPAGFYRNAEPYDEVNGRGA |
| | YGWFFAVLFFIYIGSMAHMLIAPLQIADSAGNLGSLLFTMCLTFCGVLVTKDALPGFWV |
| | FMYRVSPFTYFIEGYLTNALAHNKIVCSEEEFRVLSPPDGLTCQDYLGDYISKAGTGYLQD |
| | PEATGSCQFCPMSKTDDFLAQVQLDYGNRWRDVGIFIAFIFINLFFAVLFYWLARVPKK |
| | SDRVSTEQPEGAVNMGAELEKKAALHRTATNAASQAASQGYAPQVYNEKVGSEEGSL |
| | DKVDNSDSSR |
| SEQ ID NO: | ATGTCCGACAACTCCGAAGTCGAATCTTTCAATGCTAAACATGTTGAAGCT |
| 1037 | TCCGGTGGTACTAAGGATCCATATACTGGTGTTCCAGATACCAACTCTGT |
| | TCAATCTTTGGCTAGAACTTTCACCCATATGTCTTTGGCTTCATCCTCTAA |
| | CGATAACGAAATCTATGGTGTTCCTGTTGATGGTCCAGAAGGTGTTGAAT |
| | CTTATAACGCTAAGATCGACCCAAACTCTGAAGAATTTGATGCTCATGCTT |
| | GGATGAGAAACTTGAACAGATTGAGATCTGCTGATCCAGACTACTACAAG |
| | AACATCTCTTTAGGTATGGCTTACAAGAACTTGTCTGCTTTCGGTGATTCT |
| | TCCGATGTTGTTTATCAACCTACCGTCTTGAACGTGTTCCAAAAATCCATT |
| | GAGGACATCTACAGAAAGGTTAGAAAAGCTAGACCATCCGATAAGTTCAC |
| | CATTTTGAAACCTATGGACGGTATTTTGAAGCCAGGTTCTTTGAATGTTGT |
| | TTTGGGTAAACCAGGTTCTGGTTGTTCTACTTTGTTGAAAACCTTGTCCTC |
| | TTCTACCTTCGGTTTCGAAGTTACCAAGGATTCCGTTATTTCCTACGATGG |
| | TATTACCCCAAAAGAGATCGAAAACAACTACAGAGGTGATGTTGTATACC |
| | AAGGTGAAGTTGATATTCACTTCCCACATTTGACTGTGTTCGAAACCTTGA |
| | ACAATGTTGCTTTGTTGACTACTCCAAAGAACAGGATTAAGGGTTTGTCCA |
| | GAGAAGAATTCTCCAAACATATGGCTGAAGCTACTATGGCTATGTATGGT |
| | TTGTCTCATACCAAGAACACTAAGGTCGGTAACGAATTGGTTAGAGGTGT |
| | TTCTGGTGGTGAAAGAAAAAGAGTTTCCATCTGCGAAATCTCATTGGTCA |
| | ATGGTAAGATCGTTTGCTACGATAACTCTACCAGAGGTTTGGATTCTGCTT |
| | CTACATTGTCCTTCATCAAGTCCTTGAAAACCCAATCTAAAGCTTCTGATA |
| | CCACTTCCGTTGTTGCTATCTATCAATGTTCTCAAGATGCCTACGATTTGT |
| | TCGATAACGTCATCGTTTTGGATGAAGGTTACCAGTTGTATAACGGTCCAT |
| | CTAACAAAGCCAAGGACTACTTTATTAAGATGGGTTACGTTTGCCCAGAA |
| | AGACAAACTACTGCTGATTTCTTGACTGCTGTTACTTCTCCAACTGAAAGA |
| | ATCAAGAATACCGAGATGATGGAAAAGGGTATCAAGATTCCAGAAACCTC |
| | CTTGGAAATGTACGAATACTGGAATGCTTCCGAAGAATGCCAAGAATTGA |
| | AGTCCGAAATCGACTACTACTTGTCCCATATCGATTCCTCATTGAAGGATC |
| | AATTCCATCAAGCTCATACTGCTTCTCAAGCTAAAAGAGCTAGACCTTCTT |
| | CTTCTTACTTGTTGACCTTTCAATTGCAGGTCAAGTATTTGTTGCAGAGAA |
| | ACTTCACTAGGATCAAGAACGATATCGGCTTGTCTATGTTTCAAGTCTTGG |
| | GTAATTCTTTCATGGCCTTGATTATTGCCTCCATGTTCTACAAGGTTATGT |
| | ACTACACTAACACCTCCACGTTCTTCTATAGAGGTGGTACTTTGTTTTACG |
| | CCGTCTTGTTTAACTCCTTCTCCTCCTTGTTGGAAATCATGACATTATACG |
| | AAGCCAGGCCAATTATCGAGAAGCAAAAGAATTTGGCAATGTACCATCCA |
| | TCTGCTGAAGCCGTTTCTTCTATTTTGTCTGAAATGCCAGCCAAGATTATT |
| | ACCGCTATTGCCTTCAATATGTTCTACTACTGGATGACCAATTTGAAGAGA |
| | GATGCTGGCGCTTTCTTTTTCTACTTGCTGATGAATTTCGTTTGCCTGTTG |
| | GCTATGTCTCACATCTTTAGATTCATTGGTTCTGCCACTAAGTCTTTTCCA |
| | GGTGCTATGGTTCCAGCTTCTGTTATTTTGTTGGGTATTTCTATGTACGCC |
| | GGTTTCGCTATTCCAAAGACTTCTATGTTAGGTTGGTCTAAGTGGATCTAC |
| | TGGATTAACCCAATTCAATACGGTTTCGAGTCCTTGATGATCAACGAATTT |
| | CATGGTGTCGAATACCCATGCTCATCTTATATTCCATCTGGTACTGGTTAC |
| | TCCGATTTTGATTCAGCTTACAAAACCTGCTCTGTTGTTGGTGCTGTTCCA |
| | GGTTCAGATATTGTCTCTGGTGATTTGTTCCTGAAGTTGTCTTATGGTTAC |
| | GAACATTCTCATAAGTGGCGTGGTTTTGGTGTTGTTTTAGCTTACGCTATT |
| | TTCTTCTTCGGTGTCTACTTGACTTTCACCGAGTATAATGAATCCGCTAAG |
| | CAAAAGGGTGAGATCATTGTCTTTCCACAAGCTGTTGTTCGTAAGATCAA |
| | GAAGATGTCTAAGTCTACCCACGATTTGGAATCAGCTTCAGCATCTGATG |
| | AATCTTACACCGACAAAAAGTTGGTTTCCGATGATTACGATGAATCCCAAG |
| | ATTCCTACAACGATGTTGGTTTGAGTGAATCCGAAGCTACTTTACATTGGA |
| | GAGATTTGTGTTACGACGTCCAAATCAAAGGTGAAACTAGAAGGATCTTG |
| | AACAACGTAGATGGTTGGGTTGCTAAGAACTCTATTACTGCTTTGATGGG |
| | TTCTTCTGGTGCTGGTAAAACTACTTTGATGGATTGCTTGGCTTCTAGAGT |
| | TACCATGGGTGTTATTACCGGTGATATTTTGGTTAACGGTAGATTGAGAG |
| | ATGAGGGTTTCCCAAGATCTATTGGTTACTGTCAACAACAAGACTTGCATT |
| | TGGCTACTGCTACTGTTAGAGAATCCTTGAAATTCTCCGCTTACTTGAGAC |
| | AACCAGCCTCTGTTTCTAAAGAAGAGAAAGACGCTTACGTCGAATCCGTC |
| | ATTAAGATCTTGGATATGCAAAGATACGCTGATGCTGTTGTAGGTGTAATG |
| | GGTGAAGGTTTGAACGTTGAACAAAGAAAACGTTTGACCATCGGTGTAGA |
| | ATTGGCTGCTAAACCTAAGCTGTTGATGTTCTTAGATGAACCTACTTCTGG |
| | TTTGGACTCTCAAACTGCTTGGTCTATTTGTCAGTTGATGAGAAAGTTGGC |
| | TAACCATGGTCAAGCTATTTTGTGCACTATTCATCAACCATCCGCCATGTT |
| | GATTGATCAGTTTGATAGGTTGCTGTTCTTGCAGAAAGGTGGTAAGACTG |
| | CTTATTTTGGTGACTTAGGTGAGGGTTGTAAGACCATGATTGATTACTTTG |
| | AATCTAAGGGTGCTCCAAAGTGTCCACCAAATGCTAATCCAGCTGAATGG |
| | ATGTTGGATATTGTCCAAGCTAGAGATTATCATGAAGCCTGGAAATCTTCA |
| | GACGAGTACAAACAAGTTCATGCTACTTTGGACGAAATGGAAAGAGAATT |
| | GCCAAACATCGTTATCTCCAACGCTGATGATACTTCTGCTTTTGCTGCTTC |
| | ATTTCCAGTCCAACTGTTTTACGTTTACAAGAGAGTCGTCCAACAATATTG |
| | GAGAACTCCAATCTATTTGTGGGCCAAGTTTTTCGTTACTGGTGCTTCTGA |
| | GTTGTTCATCGGTTTTACTTTCTTTAAGGCCAACCACACATTGCAGGGTTT |
| | GAAGAATCAAATGTTGGCCATCTTCATGTTCGTCGTCATTTTTAACCCATT |
| | CTTGCAACAGTACTTGCCAATCTTTACTCAACAGAGAGACTTGTACGAAG |
| | CTAGGGAAAGACCATCTAGAACATTTTCTTGGTACGCTTTCTTGATCGGTC |
| | AAATGTTAGCTGAAATCTTCCCAAACATTTTGTGTGCCATCTTGGGCTTTT |
| | TCTGTTTTTACTACCCAATTGGTTTCGCCTCTAACGCTTCTTATTCTGGTC |
| | AATTGGTTGAGAAGTCTGGCCTGTTTTTCTTCTACTCCTTGATTTTCTTCA |
| | CCTGGATTGGTTCTACAGCATTGATGGTTGCAGCTCCATTTGAAGATCCT |
| | CAAGCTGGTGGTCATTTGGCCAATTTGATGTTTACAATGGCCTTGTCTTTC |
| | AACGGTGTTTTTGTTGGTCCAGGTAAATTGCCAGGTTTTTGGAAGTTTATG |
| | TACCGTGTTTCTCCATTGACCTACTTCGTTGATGGTGCTTTGTCTATAGGT |
| | TTGTCCGATAACAAGGTTGAATGCTCTCAATACGAGTACACTGATGTTCAA |
| | TTGCCAGCTGGTATGACTTGTGGTGAATATTTGTCTCCTTACATCGAGAA |
| | GGTTGGTACAGGTTACATTTTGGATAAGAACGCTACCTCTGAATGCAAGA |
| | TGTGTCAAATTTCTACTACCAACGCCTTCTTGACCACTGTTTCATCTAAAT |
| | ATTCTAGGCGTTGGCGTAACCTGGGTATTTTCATTGCTTACATTGCTTTCA |
| | ACTACGTGATGGCCATGTTCTTATATTGGTGGGCTAGAGTTCCAAAGAAG |
| | GCTAACAGAGTTTCTGACGAAAAAGACTCTTCCAAGGATAAGAAGGACGA |
| | GAAGAAGTAG |
| SEQ ID NO: | MSDNSEVESFNAKHVEASGGTKDPYTGVPDTNSVQSLARTFTHMSLASSSNDNEIYGV |
| 1038 | PVDGPEGVESYNAKIDPNSEEFDAHAWMRNLNRLRSADPDYYKNISLGMAYKNLSAF |
| | GDSSDVVYQPTVLNVFQKSIEDIYRKVRKARPSDKFTILKPMDGILKPGSLNVVLGKPGS |
| | GCSTLLKTLSSSTFGFEVTKDSVISYDGITPKEIENNYRGDVVYQGEVDIHFPHLTVFETLN |
| | NVALLTTPKNRIKGLSREEFSKHMAEATMAMYGLSHTKNTKVGNELVRGVSGGERKRV |
| | SICEISLVNGKIVCYDNSTRGLDSASTLSFIKSLKTQSKASDTTSVVAIYQCSQDAYDLFDN |
| | VIVLDEGYQLYNGPSNKAKDYFIKMGYVCPERQTTADFLTAVTSPTERIKNTEMMEKGI |
| | KIPETSLEMYEYWNASEECQELKSEIDYYLSHIDSSLKDQFHQAHTASQAKRARPSSSYLL |
| | TFQLQVKYLLQRNFTRIKNDIGLSMFQVLGNSFMALIIASMFYKVMYYTNTSTFFYRGG |
| | TLFYAVLFNSFSSLLEIMTLYEARPIIEKQKNLAMYHPSAEAVSSILSEMPAKIITAIAFNMF |
| | YYWMTNLKRDAGAFFFYLLMNFVCLLAMSHIFRFIGSATKSFPGAMVPASVILLGISMY |
| | AGFAIPKTSMLGWSKWIYWINPIQYGFESLMINEFHGVEYPCSSYIPSGTGYSDFDSAYK |
| | TCSVVGAVPGSDIVSGDLFLKLSYGYEHSHKWRGFGVVLAYAIFFFGVYLTFTEYNESAK |
| | QKGEIIVFPQAVVRKIKKMSKSTHDLESASASDESYTDKKLVSDDYDESQDSYNDVGLSE |
| | SEATLHWRDLCYDVQIKGETRRILNNVDGWVAKNSITALMGSSGAGKTTLMDCLASR |
| | VTMGVITGDILVNGRLRDEGFPRSIGYCQQQDLHLATATVRESLKFSAYLRQPASVSKEE |
| | KDAYVESVIKILDMQRYADAVVGVMGEGLNVEQRKRLTIGVELAAKPKLLMFLDEPTS |
| | GLDSQTAWSICQLMRKLANHGQAILCTIHQPSAMLIDQFDRLLFLQKGGKTAYFGDLG |
| | EGCKTMIDYFESKGAPKCPPNANPAEWMLDIVQARDYHEAWKSSDEYKQVHATLDE |
| | MERELPNIVISNADDTSAFAASFPVQLFYVYKRVVQQYWRTPIYLWAKFFVTGASELFIG |
| | FTFFKANHTLQGLKNQMLAIFMFVVIFNPFLQQYLPIFTQQRDLYEARERPSRTFSWYA |
| | FLIGQMLAEIFPNILCAILGFFCFYYPIGFASNASYSGQLVEKSGLFFFYSLIFFTWIGSTAL |
| | MVAAPFEDPQAGGHLANLMFTMALSFNGVFVGPGKLPGFWKFMYRVSPLTYFVDGA |
| | LSIGLSDNKVECSQYEYTDVQLPAGMTCGEYLSPYIEKVGTGYILDKNATSECKMCQIST |
| | TNAFLTTVSSKYSRRWRNLGIFIAYIAFNYVMAMFLYWWARVPKKANRVSDEKDSSKD |
| | KKDEKK- |
| SEQ ID NO: | ATGACCTCTCCATCTGCCTTGGAATCCAATCAATTGTCTACTGAAAGACAGAAGAGG |
| 1039 | CTGTTGTCTTTCTTGATGTCTAAAAAGGTTCCACCAGTGCCAACTCAAGAAGAAAGA |
| | AAACCATATCCAGGTTACAGAGCCAACATTATCAAGCAGTTGTTTTTCTGGTGGTTG |
| | TCCCCAGTTATGAAGGTTGGTTATCAAAGAACATTGCAACCAGACGACATGTTCTAC |
| | TTGACCGATGATATTAAGGTTCAGAAAATGGCCGAAGATTTCTACAGGTACATGTC |
| | CCATGATATTGATAGAGCTAGACAAAAGCACATTGCTGAAAAGTGTGCTAAAAGAG |
| | GTGAAGCTCCAGAAACTACTTCTGTTTCTCCTGAAGAAGATATGAAGGACTTCGAG |
| | ATGTCTAAGTTCTTGACTGTTTGGGCTTTAGCTAAGACTTTTAAGTGGCAGTATACTT |
| | GGGCTTGTGTTTGTTTGGCTTTGTCTAATGCTGGTCAAACTACTATGCCTCTGCTGTC |
| | CAAAAAGTTGATCCAATACGTTGAATTGAAGGCCTATGGTAGAGAACCAGGTGTTG |
| | GTAAAGGTTTGGGTTATTCTTTTGGTACTACTGCCATGGTTTTCATCGTTGGTGTTTT |
| | GATCAACCACTTCTTCTACAGATCTATGATTACTGGTGCTCAAGCTAAAGCTGTTTTG |
| | ACTAAGGCTTTGTTGGACAAGTCTTTCAAGTTGTCTGCTGAAGCTAAACACAAGTAC |
| | TCCGTTGGTAAGATTACTTCCATGTTGGGTACTGACTTGTCTAGAATTGATTTCGCTT |
| | TGGGTTTCCAGCCATTCTTGATCGTTTTTCCAATTCCAATTGCTATCGCCATCGTTATC |
| | TTGGTCATCAATATTGGTGTTGCCTCTTTGGTTGGTGTCGGTATTTTGTTGGTTTTTA |
| | TGATTGGTATCGCCTTCTCTACCGGTAAGTTGTTTGCTTATAGAAAGAAGGCTAACA |
| | AGTACACCGATTCCAGAGTTAACTACATGAAGGAAGCTCTGAACAACCTGAAGATC |
| | ATCAAGTTTTATTCTTGGGAACCACCATACCACAAGAACATTTCCGATATCAGAAAG |
| | AAAGAGATGAGGATCATCTACAGAATGCAGGTCTTGAGAAATATCGTTACCTCTTTC |
| | GCTATGTCCTTGACTTTGTTCGCTTCTATGACTGCATTTTTGGTCTTGTACGCTATCTC |
| | TAACGGTAGAAGAGATCCAGCTTCTATCTTCTCTTCCTTGTCCTTGTATAACGTCTTG |
| | ACCCAACAAGTTTTCTTGTTGCCAATGGCTTTGGCTACAGGTGCTGATGCTTTTATG |
| | GGTATTTCTAGAGTTGGTGATTTCATGGCCCAATCTGAAATCAATCCAGAAGAAAAC |
| | GCTATTGAAGCTCCTCCAGATGTACAAGAGTGGATGGACAAAGAATCTTTGGCTAT |
| | TGATATCGAGAAGGCCTCTTTTGAATGGGAAGTTTTTGAAGATGAGGACGAGAAA |
| | GAAGAGAAGTCCTCTAAAAAGTCTAAGAAGGGAAACAAGAGGAACTCCGAAGAAT |
| | CTGCTATTTTGGATGTTCAAGACTCCGATGTCTCTAGCTCAAAAGGTTTAGATAGAT |
| | CCTCTATTACCGACGGTTCTTCCGAAGAAGATGCACATTTTGAAGGTTTGAAGAACA |
| | TCGACTTCAAGATCAAGAAGGGTGAATTCGTTGTTATCACTGGTATGATCGGTTCCG |
| | GTAAATCTTCTTTGTTATCTGCTATGTCCGGTTTCATGAAGAGAAACTCTGGTTCTGT |
| | TTACGTCAACGGTTCTTTGTTGTTGTGTGGTTATCCATGGGTTCAAAACTCCACTGTT |
| | AAGGACAACATCATCTTCGGTTCTGAATACGACGAAGAAAAGTACAAGAGAGTTAT |
| | CTACGCTTGCTCTTTGGAAGCCGATTTGGAATTATTGCCAGCTGGTGATAGAACCGA |
| | AATTGGTGAAAGAGGAATTACTTTGTCTGGTGGTCAAAAGGCTAGAATCAATTTGG |
| | CTAGAGCTGTTTACGCTAACAAGGACATTATCTTGTTGGATGATGTTTTGTCCGCTG |
| | TTGATGCAAGAGTTGGTAAACATATTATGAACAACTGCCTGCTGGACCTGTTGAAA |
| | GAAAAGACTAGAGTTTTGGCTACCCACCAGTTGTCTTTGATTGGTTCTGCTGATAGA |
| | GTCATCTTCTTGAATGGTGATGGTTCCATTGATGTCGGTAAGTTCGAAGAATTGAAA |
| | GAGAGAAATCCAGGTTTCGGTAAATTGATGGCTTTCAACTCCGAATCCAAAGAAGA |
| | AAAAGAAGGCAACGAAGAAGAATTGGAACAATCCGCTGAACAAGAATTGATCGAA |
| | GAGGATAAGAGAAACATCGAAAGACAGTTGACTAGAAGATCCACTAGAACTGTTA |
| | CTACTGTTGGTGCTTTTCCAGAAGATGTCGACGAAGAGGAAGAAGAGGACGAAGA |
| | AGGTAGACATAGGGAGTATAATTTGGATGAAGAAGCTGACGGCAAGTTGATTACT |
| | GATGAAGAAAGAGCAGTTAACGCCATCTCTAAGAAAATCTACGCTAGATACTTCCA |
| | GCTAGGTTCTGGTAAATTCACTCCATGGGCTATGTTGCCTTTGTTATTGACTTTTATT |
| | GTCCTGGCTACCTTCTCTCAAATTTTCACTAATACCTGGTTGTCCTTCTGGACTGAGT |
| | ACAAATTTGATAAGCCTAACAAGTTCTACATCGGCATCTACATCATGTTCACGTTCTT |
| | GTCCTTCATTTTGTTGACCTGCGAATTCATCATCTTGGTCTATATTACCAATACCGCC |
| | TCCGTTCAAATGAACGTTTTAGCAGTTCAAAAGGTCTTGCATGCTCCAATGTCTTTTA |
| | TGGATACAACTCCAATGGGCAGAATCTTGAACAGATTCACTAAGGATACCGATGTC |
| | TTGGATAACGAAATCGGTGATCAATTGAGGTTCTTCTTGTTTGTTTTCGCCAACATCA |
| | TTGGTGTTATCGTCTTGTGCATTATCTACTTGCCTTGGTTTGCTATTGCTGTTCCATTT |
| | TTGGGTATGCTGTTCGTTTCAATTGCCGATTATTACCAAGCTTCTGCCAGAGAAGTT |
| | AAGAGATTGGAAGCTGTTCAAAGGTCCTTGGTTTACAACAACTTCAACGAAACATT |
| | GTCTGGTATGGCTACCATTAAGGCTTACAAAGCTACCGAAAGATTCATCGACAAGA |
| | ACAACTACCTGATCAACAGAATGAACGAAGCCTACTACATTACCATTGCTAATCAAA |
| | GATGGTTGGCCATCCACATGGATTTTGTTGCTACTTTATTCGCCTTGCTGATTGCTTT |
| | GTTGTGCGTTTTTAGAGTGTTCAACGTTTCCGCTTCTACTGTCGGTTTGATTTTGTCT |
| | TACGTCTTGCAAATAGCCGGTCAGTTGTCTATGTTGATTAGAACTTTCACCCAGGTC |
| | GAAAACGAAATGAATTCTGCTGAAAGGTTGAACTCTTACGCTACTTCTTTGCCAACA |
| | GAAGCCCCTTACATTATTACTGAAAATGCTCCACCACCAAACTGGCCATCTCAAGGT |
| | ACTATAGTTTTTGATTACGCTTCCTTGGCTTACAGACCAGGTTTGCCATTGGTTTTGA |
| | AGAATTTGAACTTCTCCGTTAAGCCCATCGAAAAGATTGGTATTTGTGGTAGAACTG |
| | GTGCTGGTAAGTCATCTATTATGACTGCCTTGTACAGGTTGTCCGAATTGGATTCAG |
| | GTAAGATTGAAATCGATGGCATCGACATCTCTAAATTGGGCTTGAAGGATTTGAGG |
| | TCCAAGTTGTCAATTATCCCACAAGATCCAGTCTTGTTTAGAGGCACTATCAGATCT |
| | AACTTGGATCCATTCAATGAACACGACGACGAAAGATTGTGGGATGCTTTGAGAAG |
| | AACTGGTTTGATTGAAGGTTCCAGATTAGAAGCCGTTAAGAGACAAGCTAAGTCCA |
| | AGTCATCAAGCAACAACATGTCTGAAAAATCCGCCGAAAAGTCTACTACTACTCCAG |
| | ATTCTTTAGCCTTGCATAAGTTCCATTTGGATCAAACTGTTGAGGATGACGGTTCTA |
| | ATTTCAGCTTAGGTGAAAGGCAATTGATCGCTTTTGCTAGAGCTTTGGTTAGAGACT |
| | CCAAGATTTTGATCTTAGATGAAGCCACCTCCTCCGTTGATTACGAAACTGATTCTA |
| | AGATCCAAGAAACCATCATCAGGGAATTCAAGGATTGCACCATTTTGTGCATTGCCC |
| | ATAGGTTGAAAACTATCATCAACTACGATAGGATCCTGGTTTTGGATAAGGGTGAA |
| | GTTAGAGAATTTGATACCCCATGGAACTTGTTCAACTCTAAGGGTTCTATTTTCAAG |
| | CAGATGTGCGAAAGATCTAACGTTACCGAACAAGATTTCGGTCAGTGA |
| SEQ ID NO: | MTSPSALESNQLSTERQKRLLSFLMSKKVPPVPTQEERKPYPGYRANIIKQLFFWWLSP |
| 1040 | VMKVGYQRTLQPDDMFYLTDDIKVQKMAEDFYRYMSHDIDRARQKHIAEKCAKRGE |
| | APETTSVSPEEDMKDFEMSKFLTVWALAKTFKWQYTWACVCLALSNAGQTTMPLLSK |
| | KLIQYVELKAYGREPGVGKGLGYSFGTTAMVFIVGVLINHFFYRSMITGAQAKAVLTKAL |
| | LDKSFKLSAEAKHKYSVGKITSMLGTDLSRIDFALGFQPFLIVFPIPIAIAIVILVINIGVASLV |
| | GVGILLVFMIGIAFSTGKLFAYRKKANKYTDSRVNYMKEALNNLKIIKFYSWEPPYHKNIS |
| | DIRKKEMRIIYRMQVLRNIVTSFAMSLTLFASMTAFLVLYAISNGRRDPASIFSSLSLYNVL |
| | TQQVFLLPMALATGADAFMGISRVGDFMAQSEINPEENAIEAPPDVQEWMDKESLAI |
| | DIEKASFEWEVFEDEDEKEEKSSKKSKKGNKRNSEESAILDVQDSDVSSSKGLDRSSITDG |
| | SSEEDAHFEGLKNIDFKIKKGEFVVITGMIGSGKSSLLSAMSGFMKRNSGSVYVNGSLLL |
| | CGYPWVQNSTVKDNIIFGSEYDEEKYKRVIYACSLEADLELLPAGDRTEIGERGITLSGGQ |
| | KARINLARAVYANKDIILLDDVLSAVDARVGKHIMNNCLLDLLKEKTRVLATHQLSLIGSA |
| | DRVIFLNGDGSIDVGKFEELKERNPGFGKLMAFNSESKEEKEGNEEELEQSAEQELIEED |
| | KRNIERQLTRRSTRTVTTVGAFPEDVDEEEEEDEEGRHREYNLDEEADGKLITDEERAVN |
| | AISKKIYARYFQLGSGKFTPWAMLPLLLTFIVLATFSQIFTNTWLSFWTEYKFDKPNKFYI |
| | GIYIMFTFLSFILLTCEFIILVYITNTASVQMNVLAVQKVLHAPMSFMDTTPMGRILNRFT |
| | KDTDVLDNEIGDQLRFFLFVFANIIGVIVLCIIYLPWFAIAVPFLGMLFVSIADYYQASARE |
| | VKRLEAVQRSLVYNNFNETLSGMATIKAYKATERFIDKNNYLINRMNEAYYITIANQRW |
| | LAIHMDFVATLFALLIALLCVFRVFNVSASTVGLILSYVLQIAGQLSMLIRTFTQVENEMN |
| | SAERLNSYATSLPTEAPYIITENAPPPNWPSQGTIVFDYASLAYRPGLPLVLKNLNFSVKPI |
| | EKIGICGRTGAGKSSIMTALYRLSELDSGKIEIDGIDISKLGLKDLRSKLSIIPQDPVLFRGTI |
| | RSNLDPFNEHDDERLWDALRRTGLIEGSRLEAVKRQAKSKSSSNNMSEKSAEKSTTTPD |
| | SLALHKFHLDQTVEDDGSNFSLGERQLIAFARALVRDSKILILDEATSSVDYETDSKIQETII |
| | REFKDCTILCIAHRLKTIINYDRILVLDKGEVREFDTPWNLFNSKGSIFKQMCERSNVTEQ |
| | DFGQ* |

### EXAMPLES

### Materials and Methods

[0426] Chemicals used in the examples herein, e.g. for buffers and substrates, are commercial products of at least reagent grade. Water utilized in the examples was de-ionized, MilliQ water.

[0427] Promoters and plasmids used throughout the examples were, unless otherwise characterized, standard promoters and plasmids abundantly known to the skilled person.

### Example 1: Analytical Methods for Thebaine, Oripavine, Nororipavine, and Glucosylated Nororipavine and Oripavine

### HPLC Analysis of Thebaine/Oripavine Samples

[0428] Stock solutions of oripavine and nororipavine were prepared in 0.1% (v/v) formic acid in H₂O at a concentration of 5 mM. Standard solutions were prepared at concentrations of 50 μM, 100 μM, 250 μM and 500 μM from the stock solutions. Samples were injected into an Agilent 1290 Infinity I UHPLC with a binary pump (Agilent Technologies, Palo Alto, CA, USA). Separation was achieved on a Kinetex F5 column (100×2.1 mm, 1.7 μm, 100 Å, Phenomenex, Torrance, CA, USA) using 0.05% (v/v) formic acid in H₂O and 0.05% (v/v) formic acid in acetonitrile as mobile phases A and B, respectively using the time-gradient as shown in Table 3.

TABLE 3

| Time (min) | % B |
|---|---|
| 0.0-1.0 | 2% |
| 1.0-4.8 | 2-30% |
| 4.8-5.0 | 30-100% |
| 5.0-6.0 | 100% |
| 6.0-6.2 | 100-2% |
| 6.2-6.5 | 2% |
| 1.5 min postrun | 2% |

[0429] Stock solutions of O-glycosyl nororipavine, O-glycosyl oripavine, nororipavine and oripavine eluted at 2.13, 2.40, 2.8 and 3 min, respectively.

[0430] The injection volume was 1 μL and the flow rate was 600 μL/min. The column temperature was maintained at 30° C. The liquid chromatography system was coupled to an Agilent 1290 diode array detector (Agilent Technologies, Palo Alto, CA, USA). UV-spectra were acquired at 220, 254 and 285 nm. 285 nm used for the quantification of nororipavine, oripavine and O-glycosyl-compounds.

### Example 2—Microtiter-Based Screening of Strains Overexpressing Eflux Transporters

[0431] sOD655 is a Saccharomyces cerevisiae yeast strain comprising recombinant polynucleotide sequences expressing P450 N-demethylases (SEQ ID No. 772 and SEQ ID No. 876), CPR (SEQ ID No. 292), PUP uptake transporters (SEQ ID Nos. 613, 473 and 537), ScUGP1 (SEQ ID No. 900), and a UDP-glucose glycosyltransferase (UGT) (SEQ ID No. 878) which enables it to convert oripavine to nororipavine and nororipavine glucoside. The background of S. cerevisiae sOD655 is similar to the commonly available strain S288C (genotype MATa his3Δ0leu2Δ0 ura3Δ0) (see the Saccharomyces Genome Database (SGD)).

[0432] Different putative efflux transporters were overexpressed in sOD655 using plasmid RPB15, an empty control plasmid that is the negative control for the data in this example. RPB15 is a derivative of vector p416TEF (Mumberg, 1995). YOR1 (SEQ ID No. 872) is used throughout the microtiter-based screening as a positive control, as it was discovered that it has an effect on glucosylated nororipavine excretion. Thus, a large number of the transporters are also ABC transporters with homology to YOR1 (see example 5). It is expected that upregulation of the native YOR1 via overexpression of transcription factors PDR1, PDR3, YRR1, and PDR8 (SEQ ID Nos. 902, 904, 906 and 908 respectively) would also improve excretion of nororipavine-gly, since these have been shown experimentally to increase YOR1 transcription in yeast (see https://www.yeastgenome.org/locus/S000002981, https://www.yeastgenome.org/locus/S000003513, and https://www.yeastgenome.org/locus/S000000101, Katzmann et al 1995). All experiments were run in at least triplicates. The strains were grown aerobically in deep well culture at 30° C. for 24 h in Delft media pH 5.5 or 4.5, followed by addition of 3 mM oripavine. After 72 hours supernatant and total broth samples were prepared. For the total broth sample an aliquot of the total cell culture was taken and analyzed. For the supernatant sample, first the cells were removed from the cell culture by centrifugation, and then an aliquot of the supernatant was taken and analyzed. Opioids were quantified as described in Example 1. The opioid outside concentration reported is the opioid measurement from the supernatant sample. The concentrations (per working volume) of a certain opioid contributed by the opioid retained inside the cell were calculated as [Opioid in total broth]−[Opioid in supernatant].

[0433] Overexpression of certain efflux transporters results in a higher ratio of extracellular to intracellular amounts glucosylated nororipavine as compared to the control. This indicates that these transporters are involved in transporting glucosylated noripavine out of the cells, which in some cases improves the amount glucosylated nororipavine produced as well.

[0434] FIG. 4 shows the ratio of extracellular to intracellular concentrations (outside the cell versus inside the cell) of glucosylated nororipavine, and the sum of total product relative to the PRB15 negative control (with no exogenous transporter). Cultures were grown at pH 4.5.

[0435] One can see that several ABC transporters showed positive results for improved excretion at pH 4.5, in particular ET60, ET71, ET58, and YOR1 (SEQ ID Nos. 910, 912, 914 and 872 respectively). Similarly, when ratios of nororipavine-glucoside outside versus inside of the cell were compared, all of the transporters showed a higher percent excretion as compared to the no-transporter control, with PDR5 being only slightly above the negative control (40% extracellular nororipavine-gly as compared to 36% for the control).

[0436] A similar experiment was conducted at pH 5.5. The following table 4 shows the percent of extracellular glucosylated nororipavine for the best-performing efflux transporters.

TABLE 4

| Transporter gene | Percent excretion |
|---|---|
| No exogenous transporter (RPB15) | 41.5-43.0% |
| ET60 | 80.8-80.9% |
| ET161 | 53.5% |
| ET58 | 56.7-58.1% |
| YOR1 | 54.1-55.9% |
| ET63 | 56.3% |
| ET71 | 69.4-71.4% |
| ET170 | 52.7% |
| ET97 | 51.0% |
| ET82 | 52.1% |
| ET81 | 52.1% |

[0437] Thirty-two other screened efflux transporters displayed higher than the negative control but at or lower than 50% excretion, whereas three transporters appeared to be lower than the negative control. At pH 5.5, the best performing efflux transporter was ET60.

[0438] Eight additional transporters were tested at pH 4.5 and 5.5 and compared to YOR1 and the negative control (RBP15). At pH 5.5 in this experiment, the negative control had 40.1% glucosylated nororipavine outside of the cell whereas the best efflux transporters appeared to be ET83 (59.7%) and ET72 (58.5%) (SEQ ID Nos. 930 and 932 respectively) where the YOR1 positive control excreted 48.7 percent, and six of the new transporters did not appear to perform better than the control. At pH 4.5 the efflux percentages of the same transporters were 58.0% for ET72, 46.4% for YOR1, 56.7% for ET83, and 36.0% for the negative control; and all 8 of the new transporter proteins tested appeared to be higher than the negative control.

[0439] Fourteen additional transporters were tested for nororipavine-gly (nororipavine glycoside) efflux in microtiter plates as described above. At pH 5.5, all fourteen showed higher activity than the control (vector only) with the best performer being ET47 (61.75% excretion) (SEQ ID No. 934). At pH 4.5, thirteen out of the fourteen showed higher activity than the negative control, with ET120 (SEQ ID No. 936) having the highest excretion at 57.24%.

[0440] Twenty-seven additional transporters were tested in a similar manner as above, in microtiter plates. At pH 5.5, RPB15 showed 38.8% excretion whereas five of the transporters were similar to or below the negative control efflux percentage. The best transporters under these conditions were ET212 (70.0%), ET193 (74.7%), and ET208 (62.4%) (SEQ ID Nos. 938, 942 and 940 respectively).

[0441] At pH 4.5, the no-transporter control excreted 35.5% whereas ET212 was 67.2%, ET208 excreted 57.4%, and ET193 excreted 72.6% of the glucosylated nororipavine. ET60 was only slightly higher in excretion than ET193 in the conditions tested, in regards to percent excretion. ET212 also produced a high total bioconversion of oripavine to nororipavine and glucosylated nororipavine as compared to other transporters, again comparable to ET60. It was noted that the transporters with the lowest activity showed very low homology to YOR1 (25% or lower), whereas high activity transporters ET212 and ET193 show 42.5 and 43.5% identity to YOR1, and 47.9 and 53.8% identity to ET60. Overall, the majority of the ABC transporters tested, especially those with homology to YOR1, worked under the conditions tested for efflux of glycosylated-nororipavine.

[0442] Overall, under the conditions tested, ET60 resulted in the highest nor-gly (nororipavine glycoside) efflux, but many other ABC transporters showed activity as well, in particular those that show homology to YOR1. Total bioconversion to nororipavine and glucosylated nororipavine increased by 10.5% percent at pH 4.5 and 22.6-26.4% at pH 5.5 as compared to the no transporter control, when using ET60. ET212 increased total bioconversion at pH 5.5 by approximately 25% as well.

[0443] One skilled in the art would recognize that the efflux transporters described herein would work in other cellular fermentations (from sugar) or bioconversion systems, e.g. from thebaine, as described in WO 2021/069714 A1, WO2020078837, and WO2018229306. Enzymes and fermentation conditions as well as required substrates are described in the referenced articles. As an example, if one were converting thebaine to nororipavine-glycoside, then thebaine specific uptake transporters would be used rather than oripavine uptake transporters; and O-demethylases and suitable CPR partners for the O-demethylase would be required. Suitable thebaine uptake transporters include, but are not limited to: PupL (T105), T161, or those improving thebaine to northebaine bioconversion in Tables 6 and 8 of WO2020078837 such as SEQ ID Nos. 307, 317, 317, 311, 733, 735 and 461. Suitable O-demethylase enzymes (and accompanying CPRs) for conversion of thebaine to oripavine or northebaine to nororipavine include but are not limited to: SEQ ID Nos. 222, 224 and 236 when individually expressed in a yeast strain that contains demethylase-CPR Ce_CPR as described in WO 2021/069714 A1, and SEQ ID Nos. 198 and 874 or variants thereof, or additional enzymes that have both N- and O-demethylase activity such as those described in paragraphs 0124-0127 of WO 2021/069714 A1.

### Example 3 Construction of a Stable Yeast Strain for Glucosylated Nororipavine Production

[0444] Strain sOD569 was produced by genomic integration using the Saccharomyces cerevisiae gene integration and expression system developed by Mikkelsen, M D et al. (2012). The following genes were integrated into stable loci using amino acid auxotrophic markers and hygMX markers: T193 AanPUP3, T109 GfPUP3, T149 AcPUP3, HaCPR E0A3A7, A0A2A4JAM9, UGP1, and KAF3968553. Multiple copies of genes A0A2A4JAM9, T193 AanPUP3, and KAF3968553 were introduced into the genome by Ty integration. The method of Ty genomic integration was modified based on system developed by Maury, J et al. 2016. Common promoters such as Saccharomyces cerevisiae TDH3, TEF1, pALD4, pFBA1, pPGK1, and TEF2 were used to drive expression of these genes. Strain sOD668 is a similar strain except that it expresses an extra (heterologous) copy of the native yeast ABC transporter YOR1 compared to sOD569. Strain sOD918 is similar to sOD569 but contains a copy of the heterologous efflux transporter ET60.

[0445] To test if inclusion of an efflux transporter improved conversion of oripavine into nororipavine compounds, or excretion of nororipavine and nororipavine glycoside in bioconversion reactions, fermentations were done in 2 L bioreactor vessels as described in Example 4 using the strains above.

[0446] One skilled in the art will recognize that other suitable polypeptides for oripavine conversion to glucosylated nororipavine may be used in combination with the efflux transporters such as those described in WO2021069714 and WO2020078837A1.

[0447] Preferred N-demethylases include but are not limited to SEQ ID Nos.: 140, 152, 843, 198, 250, 252, 771, 875 or insect demethylases disclosed in WO2021069714 as SEQ ID NO: 140, 142, 144, 146, 148, 150, 152, 154, 156, 158, 160, 162, 164, 166, 168, 170, 172, 174, 176, 178, 180, 182, 184, 186, 188, 190, 192, 194, 196, 827, 829, 831, 833, 835, 837, 839, 841, 843, 845, 847, 849, 851, 853, 855, 857, 859, 861, 863, 865, 867 and 869.

[0448] Preferred CPRs include but are not limited to SEQ ID Nos.: 292, 305 or sequences described in WO2021069714 as SEQ ID NO: 292, 294, 296, 298, 300 or 302.

[0449] Preferred PUP transporters for oripavine uptake include but are not limited to SEQ ID Nos. 473, 479, 481, 487, 493, 495, 503, 507, 509, 513, 517, 523, 525, 527, 529, 537, 539, 541, 543, 547, 551, 559, 561, 567, 571, 573, 575, 579, 589, 591, 595, 597, 599, 611, 613, and 617.

[0450] Preferred UGTs (data not shown) include but are not limited to SEQ ID Nos. 879, 881, 883, 885, 887, 889, 891, 893, 895, 897.

### Example 4: Fermentation Process Using Stable Production Strain

[0451] One skilled in the art will appreciate that many different fermentation conditions, media, and carbon sources would be acceptable for nororpavine-glucose production using strains expressing ABC efflux transporters described in this patent. Non-limiting examples of other bioconversions utilizing oripavine include WO2021069714 and WO2020078837A1.

[0452] In this particular example a 2-stage seed culture process was used from frozen glycerol stocks using minimal medium containing 20 g/L of glucose. Cells were grown at 30° C. on an orbital shaker (180 rpm) for c.a. 24 hours at each stage in order to reach a final OD₆₀₀ suitable for inoculation. Approximately 12% inoculum is used, one skilled in the art will know that typical inoculation volumes can range from approximately 3-20%.

### Process Parameters for Batch and Fed-Batch Phases of Cultivation

[0453] The fermentation process is a fed-batch process operated with multiple feed rates. During all phases, temperature was kept at 28° C. with stirring at 1100 rpm. pH was controlled at 5.5 using ammonium hydroxide 17% (w/w). Aeration was continuously increased to keep 1.5 vvm.

[0454] The first (batch) phase is typically less than 12 hours uses minimal media with 10 g/L glucose, and is typically a fill volume that is one-third to one-half of the total final working volume. Oripavine can be added during the feed phase or optionally during the batch phase. Fed-batch phases include both a glucose-limited exponential growth phase targeting a growth rate of approximately 0.1 h⁻¹ followed by constant feed rates supplying the carbon source. Feed solutions used are made in minimal medium, typically containing 620 g/L glucose. Fermentation length ranges from ca 80 hours to 140 hours. In this particular example the following media compositions were used:
[0455] Batch Media: glucose 10 g/L, (NH₄)₂SO₄ 5 g/L, KH₂PO₄ 3 g/L, MgSO₄·7 H₂O 0.5 g/L, trace elements solution 10 mL/L, vitamin solution 12 mL/L.
[0456] Fed batch Media: glucose 620 g/L, (NH₄)₂SO₄ 5 g/L, KH₂PO₄ 11.2 g/L, MgSO₄·7 H₂O 6.3 g/L, K₂SO₄ 4.3 g/L, Na₂SO₄ 0.35 g/L, elements solution 10 mL/L, vitamin solution 12 mL/L.
[0457] Vitamin solution: d-biotin 0.1 g/L, Ca-pantothenate 2 g/L, Nicotinic acid 2 g/L, Thiamine-HCl 2 g/L, Pyridoxine-HCl 2 g/L, 4 aminobenzoic acid 0.2 g/L, Myo-inositol 25 g/L.
[0458] Trace elements solution: Na₂-EDTA·2 H₂O 15 g/L, FeSO₄·7 H₂O 3 g/L, ZnSO₄·7 H₂O 4.5 g/L, MnCl₂·4 H₂O 5.1 g/L, CoCl₂·6 H₂O 0.32 g/L, CuSO₄·5 H₂O 0.3 g/L, Na₂MoO₄·2 H₂O 0.4 g/L, CaCl₂) 2.27 g/L, HaBO₃ 1 g/L, KI 0.1 g/L

### Results of Fed-Batch Fermentation

[0459] The results of the fermentations of production strains described in Example 3 are shown in FIG. 5. Here it is demonstrated that once oripavine is fed to the fermentation and the strain starts converting the oripavine to nororipavine and glucosylated nororipavine, the expression of YOR1 and YOR1 homolog ET60 ABC efflux transporters improve bioconversion of oripavine to nororipavine and nororipavine-glucoside as evidenced by increased titers and lower residual oripavine (latter not shown). All strains expressing heterologous efflux transporters (ET60, YOR1, ET71, ET58) appeared to grow better than wild type, 9-27% higher biomass by the end of fermentation with similar inoculation and early biomass levels. Additionally, it was observed in similar strains and fermentations that the total glycosylated nororipavine titer at the final timepoint was higher in strains expressing YOR1 (34%) and ET58 (9%) heterologously as compared to strains with no heterologous efflux transporter expressed.

[0460] It was also observed that ET71 and YOR1 expressing strains produced the highest percentage of glycosylated nororipavine product as compared to total nororipavine-containing product (glycosylated and non-glycosylated, data not shown).

### Example 5 Analysis of YOR1 Homologs Showing Efflux Activity on Glucosylated Nororipavine

[0461] It was noted that many of the highly active transporters identified in the microtiter plate assays had homology to the endogenous yeast transporter, YOR1, given the systematic name of YGR281W by the Saccharomyces Genome Database (https://www.yeastgenome.org).

[0462] YOR1 homologs are defined for the purposes of this example as proteins which when blasted against Saccharomyces cerevisiae S288C, result in the top hit being YOR1. More specifically, blastp (https://blast.ncbi.nlm.nih.gov/Blast.cgi?PAGE=Proteins) searches were conducted using default scoring parameters (BLOSUM 62, Existence 11, Extension 1) and selecting organism Saccharomyces cerevisiae S288c (taxid:559292) rather than using the nr (non-redundant) default database. The top hit is defined as the one with the lowest E value (displayed first in the blast output results). With the results presented here we show that fungal transporters, having homology to Saccharoyces cerevisiae S288C YOR1, as described here, are generally very likely to be useful for excreting glucosylated nororipavine.

[0463] The efflux transporters showing activity on glucosylated nororipavine, including the transporters found to have the highest specificity for glucosylated nororipavine, ET58, ET83, ET47, ET71, ET60, ET193, ET208, ET212, ET72, ET63, YOR1, and ET120, were compared to one another by pairwise sequence homology. See Table 5 below showing pairwise identity between each of the listed proteins:

TABLE 5

| | ET58 | ET83 | ET47 | ET71 | ET60 | ET193 | ET208 | ET212 | ET72 | ET63 | YOR1 | ET120 |
|---|---|---|---|---|---|---|---|---|---|---|---|---|
| ET58 | 100 | 75.95 | 64.73 | 50.88 | 46.33 | 49.43 | 48.69 | 45.13 | 47.66 | 45.68 | 45.61 | 46.96 |
| ET83 | 75.95 | 100 | 65.4 | 50.98 | 45.96 | 48.58 | 49.86 | 45.11 | 48.65 | 46.78 | 45.14 | 47.02 |
| ET47 | 64.73 | 65.4 | 100 | 50.92 | 48.14 | 48.92 | 48.3 | 44.45 | 49.68 | 48.33 | 46.23 | 47.81 |
| ET71 | 50.88 | 50.98 | 50.92 | 100 | 45.07 | 43.99 | 44.17 | 43.06 | 43.48 | 43.04 | 42.18 | 43.13 |
| ET60 | 46.33 | 45.96 | 48.14 | 45.07 | 100 | 55.53 | 52.25 | 47.66 | 47.73 | 44.79 | 43.34 | 43.57 |
| ET193 | 49.43 | 48.58 | 48.92 | 43.99 | 55.53 | 100 | 53.31 | 50.37 | 48.74 | 45.7 | 43.94 | 45.6 |
| ET208 | 48.69 | 49.86 | 48.3 | 44.17 | 52.25 | 53.31 | 100 | 48.01 | 50.68 | 50.18 | 44.67 | 45.08 |
| ET212 | 45.13 | 45.11 | 44.45 | 43.06 | 47.66 | 50.37 | 48.01 | 100 | 46.12 | 44.35 | 41.99 | 43.93 |
| ET72 | 47.66 | 48.65 | 49.68 | 43.48 | 47.73 | 48.74 | 50.68 | 46.12 | 100 | 68.56 | 44.32 | 44.3 |
| ET63 | 45.68 | 46.78 | 48.33 | 43.04 | 44.79 | 45.7 | 50.18 | 44.35 | 68.56 | 100 | 42.31 | 43.26 |
| YOR1 | 45.61 | 45.14 | 46.23 | 42.18 | 43.34 | 43.94 | 44.67 | 41.99 | 44.32 | 42.31 | 100 | 62.68 |
| ET120 | 46.96 | 47.02 | 47.81 | 43.13 | 43.57 | 45.6 | 45.08 | 43.93 | 44.3 | 43.26 | 62.68 | 100 |

[0464] The proteins described above, were further analyzed by doing a full length alignment ClustalW version 2.1 software available on genome.jp as shown in Table 6 below. Asterisks indicate absolute conservation amongst proteins, and colons or periods indicate conservative substitutions, with colons being more conservative substitutions than periods. Known motifs for transporters are designated in bold below the amino acid residues.

TABLE 6
Multiple sequence alignment of most active YOR1 homologs
CLUSTAL 2.1 multiple sequence alignment

| | |
|---|---|
| ET72 | ------------------------------------------------------------ |
| ET63 | ------------------------------------------------------------ |
| ET208 | ------------------------------------------------------------ |
| ET60 | ------------------------------------------------------------ |
| ET193 | ------------------------------------------------------------ |
| ET212 | ------------------------------------------------------------ |
| YOR1 | MTITVGDAVSETELENKSQNVVLSPKASASSDISTDVDKDTSSSWDDKSLLPTGEYIVDR |
| ET120 | ---------------MPTIRQELRHSSSGSENEKAESLYVKNEGKLDKVATQNSYYEVDR |
| ET58 | ----------------------------------------------------------MA |
| ET83 | ------------------------------------------------------------ |
| ET47 | ----------------------------------------------------------MT |
| ET71 | ------------------------------------------------------MSSNTS |
| ET72 | ---------MSVEETAGTNLALQKRSLTFLFG-KKVPPLPLEEERKVFPHYHTNIIYRAF |
| ET63 | ---------MNVEAANEKELLLQKRSLTFLYG-KNVPPLPLEEERKVEPHRHTNIISRAL |
| ET208 | ----------------MSEPPRQKRILSWALS-KKVPPITQEEDRLEYPEKRANILSKIE |
| ET60 | -MVENKANKLDSSSLEDNGLERQQRLLSFLWP-KTVPPLPNEDERLLYGEKRAGIFSKAF |
| ET193 | ---------MSDYDLEENHLVRQNRLLSSLFS-KELPPIPEDDERPEHPERDANFFSKIE |
| ET212 | --------MAELEKGDEAQPALQHRLCTPLLS-KKVPPVPRDEDRPVHP-KAINPFSWEE |
| YOR1 | NKPQTYLNSDDIEKVTESDIEPQKRLESELHSKKIPEVPQTDDERKIYPLFHTNIISNME |
| ET120 | NRPETEMNSDDLEKVTESEIYPQKRMESFLHSKKIPPIPTDE-ERPVYPLFHANWISRIE |
| ET58 | KDGIVISTEAPLKDAESGQLVLERRLLTPLLS-KKVPPIPTDEERKFYPEKKANPISKVE |
| ET83 | MAEDLGLSSPKTDPEDSSKLVLERRIMTPFLS-KKVPPVPTEAERKYFPKNKN-PLSLIE |
| ET47 | SPGSEKCIPRSDEDLERSEPQLQRRLLTPFLLSKKVPPIPKEDERKPYPYLKINPLSQIL |
| ET71 | MKDEDDYQDLEKSNAHIQQPRPVKRLLTPLLT-KYVPPIPQESERTRFPFYHTNIFSKAL |
| | .* : * : :* . : : |
| ET72 | FWYLTPLMRVGYKRTLQPEDMYLLDEEQTIDYMYKKFIASVDSDLEKQKAKHILKKCKER |
| ET63 | FYYLNPMLRVGYKRTLQPQDMYVLDERDSVDAMYDKERNYLDVELDKARAKHIQKKREAR |
| ET208 | FSWLDPLLHKGYRRTLEPEDLWYLIDELKLEHYYSVFLAQFEPDLAARREAHLEAKCKAR |
| ET60 | FWWMIPVMNPGYMRTLQPEDLFTLIDDISVEQMSARENKLFKKKVDKAKRKHIIQKFKNR |
| ET193 | FWWMIPVMNTGYKRTLTPKDLFTLSDDIKVETMAAREMAIFTSDVERAKLKHVKKKCKKR |
| ET212 | FTWLTPVLLRGYKRTLLPEDMFKLHDEMTVEHLAGKFQAIFDRRLAADKKKYLKRRRQLA |
| YOR1 | FWWVLPILRVGYKRTIQPNDLFKMDPRMSIETLYDDFEKNMIYYFEKTRKKYRKRHPEA |
| ET120 | FWWVFPILRVGYKRTLQPGDLWKMDDRMSIETLYADEERYLEVYREKARVQYRKEHPNA-- |
| ET58 | FWWLNPIMNVGYKRTLTPQDLFKLTPDMTIDHTYEKFDRYLTKIVEKDRAAALKKDPSL- |
| ET83 | YWWLNPIMKVGYKRILTPNDLYKLTPEMKIDHTYDKFEKILMKIVEKDRAKALAEDPSL- |
| ET47 | FWWLNPLLRVGYKRTLDPNDFYYLEHSQDIETTYSNYEMHLARILEKDRAKARAKDPTL- |
| ET71 | FAWLLPLLEKGYKRTLQQEDLWKLDEHTSIDHVYIKFEKHLNEEWLKEDAKHDPIK---- |
| | : :: *:: ** **: *:: : :: : . |
| ET72 | GETPES--SSVDPETDLEDFELHYVYLVKGLIRVFGWQYGWATFIKAFADLSSALLPLVL |
| ET63 | AELGNT--STVDEDTDLEDFELPYIVIVKGLFHLFGWQYMWGSLLKVFTDLFYTLMPLVQ |
| ET208 | GETFET--STVTEDEDLADFVYPWPKFGLILLKTFFRQYVGACVLKTIGDLASTTAPLLQ |
| ET60 | NEKVEI-SDIDQYKDDLEDFTPPQFLPWFVIIETFKWEYFAAVIFLALMYGTSSCIALVT |
| ET193 | GETLES-SSVD-FDTDVEDFKVSPIMFFFTIWKTYKYQYFAASVCLAIANSAQAVNPLLF |
| ET212 | LKKGDSDVSARTDEDLMLEYEPSKSLCFLSLYETFLWQYSMALLFGMLGLVGQACNPLLS |
| YOR1 | -----------TEEEVMENAKLPKHTVLRALLFTFKKQYFMSIVFAILANCTSGFNPMIT |
| ET120 | -----------TEEEIIENAVMPKHTLVKVLLYTFKWQYFLAFAAMALSNAASAFLPMVT |
| ET58 | -----------TPEDLERREYP-KFAIIKALFLTFKWEYSTAIMFKVFADVCGVCNPLLS |
| ET83 | -----------TEEDLIRRPYP-KYALPKALFLIFKWKYILALFFKVLADVCGVCNPLLS |
| ET47 | -----------TDEDLKNREYP-KNAVIKALFLTFKWKYLWSIFLKLLSDIVLVLNPLLS |
| ET71 | ----------------NPDAFP-RFAIFMALMKTFKYEYTVAIVTKIISNALSAFTPLVS |
| | : : :* . : .:: |
| ET72 | KRLINFVERKAYGLEPHVGKGIGYAFGVSLMVYFSGFAFNHFFYNSTTVGAKVKAVLTKA |
| ET63 | KRLVNFVEESAYGFHPTLGKGVGYSIGVGLMVYFAGLCVNHFVYNSITVGAKCKAVLTKL |
| ET208 | KALINYVTKRAKGLEPNVGTGVGYAIGCALFVTLEGLMVNHYFYHAMVTGSQVKAILTKE |
| ET60 | KELIKYVEYKAVGVELGIGKGLGYAFGTVGMVVFTGEMGNHYFYRAMLIGAKTKAVLIKS |
| ET193 | KKLITYVGLKAYGIEQGVGKGVGYAIGSCLIEFLGAVLENHFFYKAMMTGAETKGVLTKA |
| ET212 | RKLINFVELEALGIPIKIGTGIGYAFGVAILMEVSDVLHNQGVYEAMLIGAQIRAIFTKA |
| YOR1 | KRLIEFVEEKAIFHSMHVNKGIGYAIGACLMMFVNGLTENHFFHTSQLTGVQAKSILTKA |
| ET120 | KRLIDFVSEKSFYPGLKVNAGVGYAIGSCVMMLLNGVLENHFFHNSQLTGVQAKSVLIKA |
| ET58 | KELIKFVSRKILNADIAVNDGVGYAFGCTLLLAFSGIFINQFLHLSITTGAHCKGILTTA |
| ET83 | KKLIAFVERKTSDPSLAVNDGIGYALGCTFLVLESGIMINQSLLHSLTTGAHCKGILTTA |
| ET47 | KALINFVDEKMYNPDMSVGRGVGYAIGVTFMLGTSGILINHFLYLSLTVGAHCKAVLTTA |
| ET71 | KKLISFISEKALVPDTPINKGIGYAFGITFMLMESAIFMNQSLLHSKFVGGHSRTILTKA |
| | : *: :: :. *:**::* : . *: . : * . : :: . |
| ET72 | LLEKSFTLDARGKHKFPIGKINSIMGTDLTRVDLALGFFPELLGFPIPLIVIIVMLLVNI |
| ET63 | LLEKSFRLDARGKHKFPVGKINSIMGTDLTRVDLAIGEFPIIFEFPFSIILCIILLLVNI |
| ET208 | MLEKSFRQTGRSRHDFPTGKVNSIMGTDLARIDFAIGELPFLPCPPVPAIVSIVLLIINI |
| ET60 | ILDKSFILSPKSKLNFPHAKITSMMSTDTARIDLGLGLQPLLLIIPIPIIVSIAILIVNI |
| ET193 | LLEKSFRLSAESKHKFPVGKITSMMGTDLSRIDLALGLQPFIFVFPIPIVISIAILIVNI |
| ET212 | LLDKSFKLNTRSRKKFPPSKITSIMSTDVSRVDIGTGFSIYGFVLIFPVGVSIGILIYNI |
| YOR1 | AMKKMFNASNYARHCFPNGKVTSFVTIDLARIEFALSFQPFLAGPPAILAICIVLLIVNL |
| ET120 | ILTKSMKLSGFSRHRFPSGKITSIMSTDLSRLELAIIFQPLLGAFFVAVAICIVILIINL |
| ET58 | LLKKSFRADAETRHKFISGRITSLMSTDLARIDLAIGLQPFGWTFPIPVIIAIALLIVNI |
| ET83 | LLRKSFKADAETRHKYTSGRITSIMSTDLARIDLAIGFQPFGLTFPIPVIIAIALLIVNI |
| ET47 | IMNKSFRASAKSKHEYPSGRVTSLMSTDLARIDLAIGFQPFAITVPVPIGVAIALLIVNI |
| ET71 | LIQKSLIANAETRFHYPSGRIISFMSADLQRIDESLFELPTGFTTLEPIIIAIVLLIVNI |
| | : * : : :. .:: *:: :* *:: . : * :*: *: |
| ET72 | GVSALAGIGVFVMSIFLTGFIVRELFRLRVIANVFTDERVNLVKELLKNEKMIKMYGWEN |
| ET63 | GVSALAGISLFVVILLFTSYVVRVLYKMRVRANVYTDQRVNLVKELLKNFKMVKMYGWEN |
| ET208 | GPSSLVGIAIFFLALIALGSTIKRLMEERLRANKFTDGRVNLVKELLKNEKMIKYYSWEP |
| ET60 | GVSALTGIAVIILVLVLIMGVGYFLFKERKKANISTDQRISSIREVLYNLKIIKFYSWES |
| ET193 | GAVALIGIGVMLLEMAVIGGTTAKLYSYRTKANKYTDIRVSYMKEVINNLKMIKFYSWEP |
| ET212 | KAPAMVGVGLMLAFVFVSGGLSTLLFSERKTAQKATDSRVGYMKEVINNLKMIKFYSWEK |
| YOR1 | GPIALVGIGIFFGGFFISLFAFKLILGERIAANIFTDARVTMMREVLNNIKMIKYYTWED |
| ET120 | GPIALVGVGIFVVAMFESAYAFKRLISVRKKINIFTDARVIMMREILNSMKMIKFYAWED |
| ET58 | GVASLAGIAVFIISILVIGGSAKALLKMRRGANKFTDKRISLMREILQSMKMIKYYSWED |
| ET83 | GVSSLAGIAVFIISIVAIGGSARFLMKMRRGANKYTDKRISLMREILQSMKMIKYYSWED |
| ET47 | GVSALAGIAVELVCIVVISASSKSLLKMRKGANQYTDARISYMREILQNMRIIKFYSWED |
| ET71 | GVSALAGIAIFFLTLILMGVPAGSLFKIREAANVFTDQRVGKMREVIQSMKMIKFYSWED |
| | :: *:.::. . : * :: ** *: ::*:: .::::* * ** |
| ET72 | SYFKEFMDIRQKEMTTVLRMQVARNVLIAVAIWLPIVSSMVAFLVLHKIDS---NRTVGD |
| ET63 | SYEKQFVDTRQKEMTIVLRMQHIRNFLDALSFWLPIITSMVSFLVLYHLRN---NRTVGD |
| ET208 | SYVKNIEETRTAEMHNVELMQIMRNIMVAFAIALPTVCSMISFLVLYGINS---SRSVAD |
| ET60 | AYLKKISGIRNEETKWILRMQVLRNLIISIAISVNLICSMVSFLVLYAIDS--DRHDPAS |
| ET193 | PYYENISSTRIKEMDIIYNMQTLRSIVTALAMSLTGFASLVAFLVLEAVDN--DRKNPAS |
| ET212 | PYHALITKIRRREMAYLLRMEITRMIIITLAASLALVSSLVSFLTLYAIASP-SSRNPAE |
| YOR1 | AYEKNIQDIRTKEISKVRKMQLSRNFLIAMAMSLPSIASLVTFLAMYKVNKGG--RQPGN |
| ET120 | AYEASVHDQRSKEISKTRIMQFTRNFVTALAVCLINISSMVTFLALYKVRNHG--RIPAN |
| ET58 | AYESSVVEQRNSEVGVILKMQSIRNELLAFSISLPSFTSMIAFLVLYGISSN---RNPAN |
| ET83 | AYEKSVIQQRTKEVGIILKMQSIRNGLLAFSIALPAFTSMIAFLVLYGVSSN---KNPAN |
| ET47 | AYEKSVVTERNSEMSIILKMQSIRNFLLALSLSLPAIISMVAFLVLYGVSND---KNPGN |
| ET71 | AYENLITGIRSKESSLVLKFQLTINVMITIAINASSITSMGAFLVLYAVKSH---GNPAN |
| | .* . * * :: : :.: . *: :**.:* : . .. |
| ET72 | IFSSLSLFQELTTQFLMVPAALAMSTDMVIAFKRISQLLSCPDGQE-----------LAT |
| ET63 | IFSSLTLFQELTGQFAMVTPSLSMATDMVVGFKRVAQLISCPDAPA-----------LEE |
| ET208 | IFSSLTLFQVLAMQLIMVPLALASGSDALIGIRRVLEFVCSGDIDEE-DSQVE----LSL |
| ET60 | IFSSLTLFGILSEQVIMLPLALATTTDAHVGLQRVGQFLASEESDQTYRKIEA----SGK |
| ET193 | IFSSISLFNVLLTQVEMLPMALATSADAFAGVGRVSTFLTTGEVDPKELETDI----SAD |
| ET212 | IFSSVSLFNLLASQFLVLPLSIAGSTDAFLGMNRVAAVLAADEIDPEDADTIL----SER |
| YOR1 | IFASLSLFQVLSLQMFFLPIAIGTGIDMIIGLGRLQSLLEAPEDDPNQMIEMK------- |
| ET120 | IFSSLSLFQVLSIQMFELPMALGTAVDGSIALNRCQELFEATEEEHDIDVDFP------- |
| ET58 | IFPSISLEFGSLAQQTMMLPMALATGTDAMIGLNRVREFLQSGVDLEDPEAPQGNDQDSQD |
| ET83 | IFPSVSLFGTLAQQTMMLPMALATGADAMIGLGRVREFLESGVDLKDPEEFDG-HAPETD |
| ET47 | IFSSISLFSVLAQQTMMLPMALATGADAKIGLERLRQYLQSGDIEKEYEDHEK-----PG |
| ET71 | VFSSLSLFGILSQQVIELPMVESSAAEGLLSLDRITKYLRSPVETFDVENFYD------- |
| | :*.*::** * * :. :. : .. * . |
| ET72 | FFDTLDDPKLALQLKNASFQWFTFEDEKPEDSKSE------------------------- |
| ET63 | FHDLLDDEKLALKLAHASFKWHTFEESATTEVVIV------------------------- |
| ET208 | IKEKMESSGSVLRVVNASFEWETFDADE-EDIAST------------------------- |
| ET60 | TLGRMQENNIAVEVNNATFIWETFDVSDE----------------------------DSK |
| ET193 | VLQRMDKEDVVIEVNNASFEWEIFEDIEEKDPKKEKEEKKKAKKAAKETKKLAKQAKNSQ |
| ET212 | TQALLEEKKLAITVQDGEFEWELFDFDDEKSEEKE-------------------EHKDES |
| YOR1 | -PSPGFDPKLALKMTHCSFEWEDYELNDAIEEAKGEAKDEGKK-----------NKKKRK |
| ET120 | -PCD--DPDLALKVVNGSFEWQDFEAEENRLATLMEIEEKKKK-----------KTKSKK |
| ET58 | ANVEKLPEDVALSVKNATFIWETFDDEEDEGADKPKADTATEK----------KDSDIAT |
| ET83 | EEVKELPSDVAIEAKDATFIWEKFAEVDSE-----------------------ETSDASK |
| ET47 | DRDVVLPDNVAVELNNASFIWEKFDDADDN------------------------DGNSEK |
| ET71 | SELIKNDEIAVQIENGEFEWELFTEIKEDDEETKKQKKKDEKQRKKEL-----KKSQGGN |
| | .: . * * : |
| ET72 | -----------DEPESSDQKSEKSAGSEVVKTEFPGLLNLNLSIAKGEFVVVTGSIGSGK |
| ET63 | -----------PESKTSSSK-------DASRTEFPGLHDLTLSISRGEFIVVTGAIGSGK |
| ET208 | -----------NESVSENERKPDPSLEGLESTSFPGLNNINLDIRKGEFVVVTGLIGSGK |
| ET60 | ISDENSDESKNSSTTNSTSERNLDEEDKDNETPFKGLIDVNLTVNKGEFVVITGVIGSGK |
| ET193 | TITPSEEELSKIDSPKFTEKELSTESKSVEEKVFAGLNNINLSIKKNEFVVITGMIGSGK |
| ET212 | KKKKKKESKKKVKKSAKDVSDTSSASSNEKERKSFKLHNVNLDIRQGAFVVITGSIGSGK |
| YOR1 | DTWGKPSASTNKAKRLDNMLKDRDGPEDLEKTSFRGFKDLNFDIKKGEFIMITGPIGTGK |
| ET120 | DKAPEP--------KHEAASIKPGHLSDTERESFKGFHNLNFEVKKGELIIITGSIGTGK |
| ET58 | PATSTKDTHSDSELKNTASSTEEEGHESYTKSVFEGFHNINLDVKKGEFVIVTGAIGSGK |
| ET83 | SDKETSSTLSEGELKKTLSSEEEEGNEQYTNSVFEGFHNINLEIKKNEFIIVTGAIGSGK |
| ET47 | TKEVVVTSKSSLTDSSHIDKSTDSADGEYIKSVFEGFNNINLTIKKGEFVIITGPIGSGK |
| ET71 | GWFNKKTKTTEDSSNDEINKESSTDEDNTNQQKPFKLSNINLKISKGEFIVVTGPIGSGK |
| | : ::.: : :. ::::** **:** |
| | Walker A |
| ET72 | SSLLNAFSGFMPKTSGSVAKNGSLMLCGYPWVQNATIKENIVFGEEYDQEKYDTIVKVCS |
| ET63 | SSLLSAISGFMPKTGGSVAKNGSLLLCGYPWVQNATVRENILFGQPFDQTKYDEIVRVCS |
| ET208 | SSLLYALSGFMHRTQGHVATIGDLLLCGNPWIQNATVKDNISFGMPFDQQKYDNVIHACS |
| ET60 | SSLLSAISGLMTRTSGEVNVCGSLISCGEPWIQNETFKENILFGSDFDPDFYKEVVHACS |
| ET193 | TSLLNALSGFMKKTSGEVLVSSSLLLCGYPWIQNTTVRENIVFGSEWDEEKYNRVIFACS |
| ET212 | SSLLHALDGAMKKLSGDVYVNGSLLMCGTPWIQSASLRENILFGSTYDEKWYKEVIRACS |
| YOR1 | SSLLNAMAGSMRKTDGKVEVNGDLLMCGYPWIQNASVRDNIIFGSPFNKEKYDEVVRVCS |
| ET120 | TSLLNALAGFMRKTEGDVYKNGSLLLCGYPWVQNATVRDNILFGSPYDKARYKEVIRVCS |
| ET58 | SSLLIALAGFMKQTGGTLTAAEDVLLCGAPWVQNTTVRENITFGLPYEEERYERVIDACA |
| ET83 | SSLLTALAGFMKRTTGSLSVGGSVLLCGTPWVQNATVRENITFGLEYDEERYERVLDACA |
| ET47 | SSLLVALAGFMKKTSGTLGVNGTMLLCGQPWVQNCTVRDNILFGLEYDEARYDRVVEVCA |
| ET71 | SSLLSAISAFMTKIDGKIAINGSNLLCGAPWVQNTTIRENVLFGSKFDHVKYKKVLEVCS |
| | :*** *: . * : * : : ** **:*. :.::*: ** :: *. :: .*: |
| ET72 | LTGDFEQFSAADKTEVGERGITLSGGQKARINLARAVYSDKDIILLDDVLSAVDAKVGKS |
| ET63 | LDTDFELFSAGDMTEVGERGITLSGGQKARINLARAVYSDRDIILLDDVLSAVDAKVGKH |
| ET208 | LEADLDLLPAGDHTEVGERGITLSGGQKARLNLARAVYADRDIILLDDILSAVDARVGKH |
| ET60 | LESDMEILPAGDKTEIGERGITLSGGQKARLNLARAVYTNKDIILLDDVLSAVDARVGKH |
| ET193 | LESDIEILPGGDLTEIGERGITLSGGQKARINLARAVYGGREIILMDDVLSAVDARVGKH |
| ET212 | LESDEDILPAGDLTEIGERGITLSGGQKARVCLARTVYANSSIILLDDVLSAVDAKVGKH |
| YOR1 | LKADLDILPAGDMTEIGERGITLSGGQKARINLARSVYKKKDIYLFDDVLSAVDSRVGKH |
| ET120 | LQADLDILPANDKTEIGERGITLSGGQKARINLARSVYKSMDTYLFDDVLSAVDARVGKH |
| ET58 | LRDDLKLFAGGDLTEIGERGITLSGGQKARINLARAVYADKSIVLFDDVLSAVDARVGKH |
| ET83 | LRDDLKLFTGGDLTEIGERGITLSGGQKARINLARAVYADKEIVLFDDVLSAVDARVGKH |
| ET47 | LGDDLKMFTAGDQTEIGERGITLSGGQKARINLARAVYANKDIILLDDVLSAVDARVGKL |
| ET71 | LEHDLKSLLAGDMTEIGERGVTLSGGQKARVNLARAVYADKEVYLFDDILSAVDANVGKN |
| | * *:. : . * **:****:*********: ***:** . *:**:*****:.*** |
| | Linker Walker B |
| ET72 | IMKDCIMGYLKNKTRVLATHQLSLIDSADKIMFLNGDGTVDYGTLDEVKSRNPEFVRLME |
| ET63 | IMEQCILGYLKGKTRILATHQLSLINAADKVIFLNGNGSIDYGTLHEVRSRNSAFIRLME |
| ET208 | IMDECLLGLLKDKTRLLATHQLSLISAADRVIFLNGDGSIDVGTTAELLARNEGFTKLME |
| ET60 | IMNNCILGTLSSKTRILATHQLSLIGSADKVIFMNGDGSLEIGKFDELIQNSSGFKDLMS |
| ET193 | IMNNCILDLLKDSTRILATHQLSLIDSADRVIFLNGDGSISVGINEELQKSNPGFAALMA |
| ET212 | IMSECIMGILKGKTRVLATHQLSLISEAEHVIFLNGDGTISRGTFEELKSTNSAFKALME |
| YOR1 | IMDECLTGMLANKTRILATHQLSLIERASRVIVLGTDGQVDIGTVDELKARNQTLINLLQ |
| ET120 | IMDECMLGRLGNKTRILATHQLSLIDRASRVIFLGTDGSFDFGSVTELKKRNAGENKLME |
| ET58 | IIDDCFGEYMKGKTRVLATHQLSLVDKADRVVFLNGDGTLHIGTVEELLTSNEGFIKLME |
| ET83 | IVDDCLCDEMGHKTRILATHQLSLIDKADRVIFLNGDGTIHIGTVNELLQSNEGFVKLME |
| ET47 | IVDDCLTSFLGDKTRILATHQLSLIEAADRVIYLNGDGTIHIGTVQELLESNEGFLKLME |
| ET71 | ITENCLLGLLSSKTIIIATHQLSLISKADRVVFLNGDGLIDVGTESELRSKNKDFVKLME |
| | * .:*: : .* ::*******: *.::: :. :* . *. *: . : *: |
| ET72 | FSHNVDDDDEDENEPEQEKND-----------DFGADD---------------------- |
| ET63 | FSHDPEEEQRPD-EADEKKED-----------ELKAEK---------------------- |
| ET208 | FSTQEKNDTTTESGEAAHSGP-----------ELEDEKELIRIQTLIKSLAEAESNSDYQ |
| ET60 | LNAQEVVRDVINNVENDSKFAG----VEDEKQYIEEQLMRRITTTSYIEDEKSGRNGVNL |
| ET193 | HNAKTEEDDEDEKIDVDLDKQ-----KFEEHHEVEKELIQRQVTRASAVDEEAIRKDYNK |
| ET212 | HNRKSEENDEDESEP------------ASEVEASEKELIKRQLTKQTTTQVSS---DSVE |
| YOR1 | FSSQNSEKEDEEQEAVVAG----------ELGQLKYESEVKELTELKKKATEMSQTANSG |
| ET120 | FANKSSDKEEGELDSTEASGDDVSTAEELEHFRDDDGQREMDASRLKKELSKRSYESSVD |
| ET58 | FSKKSSEDDEEEDED-------------------IDEEEQEIIALQKSQSLAVIQSKKNN |
| ET83 | ESKKSEEDEKNEEE----------------------EEEADVLKLQKSQSIAASQ----N |
| ET47 | FSRKSESED----------------------------EEDVEAANEKDVSLQKAVSVVQE |
| ET71 | YNKELEQKNTDDEE------------------------------QINDKITKVTSIADKP |
| | . |
| ET72 | --DEDGRLIRAEEKAVNAISWDVYRTYIKAGSG-KLGYFYPVVVVLAFSVSTFCLLFVNN |
| ET63 | --EEDGKLMRDEERAVNSISKNVYSTYILSGSG-KLGYLFPILILFACAVSTESDLFTNN |
| ET208 | HKDADGVLMQLEDRAVNAIELGVYGKYLKLGAG-AFGIGIIPLLLGLVACSVFCSLFTNT |
| ET60 | DRIDDGKLFLAEERAVNRIEFKVYKNYVKYGSGIESSFCIIFLFLLFTVLATYFELFTNT |
| ET193 | NVEEDGHLIEDEDRGVNAIALDVYLTYVKLGSGKYTAWGIVPPMLVFMALATFCQIFTNT |
| ET212 | KVELDGKLYDEEEKSVNAIGWDVYGRYILTGVQGFKFNWLLFVILCLCILGTFMSLFTNN |
| YOR1 | KIVADGHTSSKEERAVNSISLKIYREYIKAAVG-KWGFIALPLYAILVVGTTFCSLFSSV |
| ET120 | ENEAAGRLMAKEERAVNSIGFDVYKNYISAGVG-KKGFVLLPEYVILLAVTTFSLLFSSV |
| ET58 | NDAAAGVLVNEEERAKNKISSKVYTEYLREGGG-ILGKFAAPIAILLLILDVFTTIFINV |
| ET83 | NDAVAGILVGEEEKAKNGISFSVYTNYLKEGGG-IFGKFAGPLTLLFLTFDVFTSIFINV |
| ET47 | QDAHAGVLIGQEERAVNGIEWDIYKEYLHEGRG-KLGIFAIPTIIMLLVLDVFTSIFVNV |
| ET71 | SGPIDGTLFGEEERAFDSIPLSLYKQYVKAGQG-MFGFTAFPLTIICIILSVFVNLFTNV |
| | * *::. : * :* *: . .: :* . |
| ET72 | WLSFWESGKFH-EPGSFYEGIYIMFGFLCLIFLIVEFLFLVYFCNMAARRFNILAFKRLL |
| ET63 | WLSFWQDKKER-KPPGEYQGIYILLGFSTLLLLTFYFALIVQFCNKAANQENTSAFQNLL |
| ET208 | WLTFWTEKKFD-RSNGFFIGIYVMFTMLTIVFMVLEFSLLVYLTNTASRLLNIYAIRRLM |
| ET60 | WLSFWISKKFPGRLDNFYIGLYVTFTELAFIFLTLEFFVLAYVTTIASRTLNLMAVKKIL |
| ET193 | WLSFWTENKFSGKDDNFYIGIYVMFTVLSFVFLALEFMSLVYMINTAAVKLNIAAVQKVL |
| ET212 | WLSFWISRKFDQPAG-FYIGFYAAFTGLAVILMVEQFCSIIFVMNRASRILNIKALGKIL |
| YOR1 | WLSYWTENKFKNRPPSFYMGLYSFFVEAAFIFMNGQFTILCAMGIMASKWLNLRAVKRIL |
| ET120 | WLSFWTEDKFKRQAG-FYMGMYIFFVFFNYFCTTGQFTLLCYLGLTASKMLNLKAVKRIL |
| ET58 | WLSFWITYKWKNRSDGFYIGFYVMFVVLNICFIASCFVLLGYISTTSARELNLKAMRRIL |
| ET83 | WLTFWITDKWSYRSQGFYIGIYVMLVLMNIVVIACCLILMGYISTTSAKSLNLKAMKRIL |
| ET47 | WLSFWISHKFKARSDGFYIGLYVMFVILSVIWITAEFVVMGYESSTAARRLNLKAMKRVL |
| ET71 | WLSFWVAQKFKNLSNGQYIGLYVMFTVLSVLFVVVELAIMGYVFTEASKTLNLKAMQKVL |
| | **::* *: : *:* : : : . :: :* *. .:: |
| ET72 | HTPMSFLDTTPMGRVLNRFTKDTDAMDNEIQDQFRQFFQPLATIVGTLILCIIYLPWFAI |
| ET63 | HAPMSFIDTTPMGRVLNRFTKDSDVLDNEIQSQFRMFIQEFSVVVGTLILCIIYLPWFAI |
| ET208 | HVPMSFMDTTPMGRILNRFTKDTDVLDNELPEQIRLLVHFIGTITGILVLCIIYLPWFAI |
| ET60 | FVPMSFMDTTPMGRIFNRFTKDTDALDNEIVEQLTVLFYFIANITGVLILCICYLPWFAI |
| ET193 | KVPMAFMDTTPMGRILNRFTKDTDVLDNEIGEQINFALFMLSNVVGIIILCIIYLPWFAI |
| ET212 | HVPMSFMDTTPMGRILNRFTKDTDILDNEIGDRVGMVVNFTFEIWGVIIMCIIYMPWFAI |
| YOR1 | HTPMSYIDTTPLGRILNRFTKDIDSLDNELTESLRLMTSQFANIVGVCVMCIVYLPWFAI |
| ET120 | HTPMSFIDTTPIGRILNRFTKDTDILDTELTESVRLFVYQTANIIGVVIMCIIYLPWFAI |
| ET58 | HAPMAYLDVTPMGRILNRFTKDTDVLDNELGEQLRLFLHPTAEVIGVIILCITYLPWFAL |
| ET83 | HSPMSFMDVTPMGRILNRFTKDTDVLDNEIGEQVRMELHPAGEVVGVVILCIIYLPWFAL |
| ET47 | HTPMHFLDVTPMGRILNRFTKDTDVLDNEIGEQARMELHPAAYVIGVLILCIIYIPWFAI |
| ET71 | HSPMSFIDTTPVGRIINRFSKDTNSLDNEIGMQLKLELHESSTIIGIIILAIIYLPWFAI |
| | ** ::*.**:**::***:**:: :*.*: : * ::.* *:****: |
| ET72 | AIPIVYALFYLISNFYLASSREIKRLEALKRSFVYSHFNESLSGMDTIKAHNSETRFLNT |
| ET63 | AIPVMIVAYYLIANFYLASSREIKRLEAVKRSEVYSHFNEALSGLDTIKAHSSSERFMET |
| ET208 | SVPILAFCYIACASYYQASAREVKRIEALQRSFVYSNFNETLQGMEVITAYKAEKRFIAR |
| ET60 | AVPPLLFLFVAIANYYQASAREIKRLEAVQRSFVYDNFNETLSGMGTIVAYKSKHRFLNK |
| ET193 | AVPFLGFMFIAVSNYYQASAREIKRLEAVSRSFVYNNFNEVLNGINTINAYKAESREVAK |
| ET212 | AVPEIVAVFIIMANFYQASGREVKRLEAVQRSHVYNNFNESLTGMPTIKAFKSIQRFLNK |
| YOR1 | AIPELLVIEVLIADHYQSSGREIKRLEAVQRSFVYNNLNEVIGGMDTIKAYRSQERFLAK |
| ET120 | AVPFLVIIFALVANHYQSSSREIKRLEAIQRSHVENNFNEVLGGIDTIRAYRGQERFLMK |
| ET58 | VIPPLLVVESCVTSYYQSSSREVKRLEAVQRSFVYNNFNEVLNGMSTLKAYRATSRFLKK |
| ET83 | VIPPVVIVSTLTASFYQASSREIKRLEAVQRSFVYNNFNEILNGMTTLKAYRSTSRFLAK |
| ET47 | AIPPLAILFTFITNEYIASSREVKRIEAIQRSLVYNNFNEVLNGLQTLKAYNATSRFMEK |
| ET71 | AVPFLAIFFLCATNFYQASSREVKRLEAINRSFVYNNFNEVMNGMNTIKAYGAGERFIRK |
| | :* : :..* :*.**:**:**:.** *:.::** : *: .: *. . **: |
| ET72 | NAHLINDMNESYYTFIAVQRWLASNLELLASLVCLLICLLCVFRVFNISGAYTGLVLTYV |
| ET63 | NSRLIDQMNESYFTEVAVQRWLACNLDIMVSEMCLFICLLCSFRIFHIRGAYAGLLLTCV |
| ET208 | NDALIDKMNEAYYLTFANMRWLSIRIDVLAAVLVLIVSLLCVMRVFHISPASVGLLLSYT |
| ET60 | NSFLIDKMNEAYYLTIANQRWLTISLDMVGAVFVLLVAMLCVNRVFHINSSSVGLLMSYI |
| ET193 | NDRLINGMNESYYLTIGNQRWLGIQMNIIAVLESLLIALLCVNRVFKISPASVGLLLSYV |
| ET212 | NVATINKMDEAYFVTVANQRWLDTYLSLLATLFALLIALLCVCRVFDIGASAVGLLVSYV |
| YOR1 | SDFLINKMNEAGYLVVVLQRWVGIFLDMVAIAFALIITLLCVTRAFPISAASVGVLLTYV |
| ET120 | NDFLTNKMNEAGYLVVAVQRWVSIALDMIAMAFALIIALLCVTRQFHISPSSVGVLLTYV |
| ET58 | NNVSVDRMNEAYFVVIANQRWISIHMDMVAVCLLFVVAMLAVTRQFSISAASAGLVVTYV |
| ET83 | NEVFVDSMNEAYFIVIANQRWISIHMDLVAVCLLAVVSLLTVTRQFNISAASTGLVVTNV |
| ET47 | NKRLLNRMNEAYLLVIANQRWISVNLDLVSCCFVFLISMLSVFRVFDINASSVGLVVTSV |
| ET71 | NDIFGDQLNEVYFVVVSNQRWIAVNLDIMATAVVFIVAMLSVTGQFSINASSVGLLTYYM |
| | . : ::* . **: *.:: . .: :* * * : *:: |
| ET72 | VNIVGLVSFMLRSMTEVENQMNSVERLKFYAIDLQQEAAYDIPERDPEPTWPASGSISFQ |
| ET63 | FNIVGMLSYMLRAMTEIENQMNSVERLKFYAVDLEQEAPFDIPERNPSPLWPQRGAICFS |
| ET208 | LNIAGMMSMLLNVSTQIENEMNSVERLEYYGFRVVQEAPFKISEKTPPPEWPHDGRIQFE |
| ET60 | LQIVGQLSFLLKTLTQVENEMNSVERICHYAFDLPEEAPYVITENSPPPSWPEKGQISFN |
| ET193 | ESIGGTLSMLIRTFTQVENEMNSVERISYYSFSLPQEAPSYITENSPPPEWPAKGEIHFK |
| ET212 | LQISGLISMLVVVFTQVEQDMNSAERVMDYVYKIPQERPYEISETRPPPEWPQNGEIRFI |
| YOR1 | LQLPGLLNTILRAMTQTENDMNSAERLVTYATELPLEASYRKPEMTPPESWPSMGEIIFE |
| ET120 | LQLPGLLNTLMRAMTQGENDMNSAERLIAYATDLPLEANYRKPEMTPAEPWPSHGEIVFD |
| ET58 | MQIGGLMSLIMRAYTTVENEMNSVERLCQYANDLVQEKPYRINETKPSPSWPESGSIEFE |
| ET83 | LQIGGLMSLIMRAYTTVENEMNSVERLYQYANTLVQEKPYRVNETVPAPSWPETGSIKFE |
| ET47 | LQIGGLMSLIMRAYTTVENEMNSVERLCHYANKLEQEAPYIMNETKPRPTWPEHGAIEFK |
| ET71 | IELSQMLSFLMQTYSEVENEMNSVERVCHYANDLEQESAYRILDYQPRPTWPEEGGIKFD |
| | ..: :. :: : *::***.**: * : * : * ** * * * |
| ET72 | DVSMRYREGLPYAVKGLSLDVAGSEKIGICGRTGAGKSSVMYSLFRLAEFEG--KITIDG |
| ET63 | NVTMSYREGLPPAVRNLSLDVAGGEKIGVCGRTGAGKSSVMYSLFRLAEFDG--RITIDD |
| ET208 | NVTLCYRQGLPAVLKNLNMDVKGAEKIGICGRTGAGKSSIMTALYRLAEMESGGRILIDD |
| ET60 | HASMAYRPELPLVLKDLDVNIKPMEKIGVCGRTGAGKSSIMMALYRLVELNSG-SVEIDG |
| ET193 | DISLAYRPGLPLVLKNLNESIKGSEKIGICGRTGAGKSSIMTALYRLSELDGG-SIVIDD |
| ET212 | NVDFAYREGLPLTLRNINADIKPHEKIGICGRTGAGKSSIMVALFRIAELTSG-SIMIDG |
| YOR1 | NVDFAYRPGLPIVLKNLNLNIKSGEKIGICGRTGAGKSTIMSALYRLNELTAG-KILIDN |
| ET120 | DVSLAYRPGLPLVLKNVSIDIGSGEKIGICGRTGAGKSTIMTALYRICELHSG-TVSIDG |
| ET58 | GVSLRYRDGLPLVLRNLTLAVAGGEKIGICGRTGAGKSSIMTALYRLSELAEG-RILIDG |
| ET83 | NVSLRYREGLPMVLKNLSMSVKGSEKIGICGRTGAGKSSIMTALYRLSELAEG-AILIDD |
| ET47 | HASMRYREGLPLVLKDLTISVKGGEKIGICGRTGAGKSTIMNALYRLTELAEG-SITIDG |
| ET71 | NLSLRYRDGLPLVLKNLSIDIKGGEKIGICGRTGAGKSSLMIALYRIAEFAEG-GIFIDG |
| | : ** ** .::.: : ****:*********::* :*:*: *: : **. |
| | Walker A |
| ET72 | VDISQIGLHKLRTKISIIPQDPVLFSGNVRSNLDPFNDRTDEELWSALEKAGLIDGSILE |
| ET63 | VDISKIGLHKLRTSLSIIPQDPVLFSGNIRSNLDPFQEHSDDNLWDALSKAGLVETDALD |
| ET208 | IDISTLGLHDLRSRLSIIPQDPVLFRGSIRGNLDPFHEHKDELLWDALRRSGLIEGSKLD |
| ET60 | IDISTLGLNNLRSRLSIIPQDPILFSGTIRINLDPFDEYTDTELWDALKRSGLIDESKIS |
| ET193 | IDISTLGLHDLRSKLSIIPQDPVMFRGTIRKNLDPFDQSTDDQLWGALVRTGLVEADRLD |
| ET212 | IDVSTLGLHELRSNLSIIPQDPVLFKGTIRSNLDPFETKTDDELWDTLRRADIIDAASLE |
| YOR1 | VDISQLGLFDLRRKLAIIPQDPVLFRGTIRKNLDPFNERTDDELWDALVRGGAIAKDDLP |
| ET120 | VDISKIGLYDLRSKLSIIPQDPVLFKGSIRRNLDPFNERTDEQLWDALVRSGAVEASEIA |
| ET58 | LDISKMGLFELRSKLSIIPQDPVLFQGTIRRNLDPFGESDDQHLWDSLRRAGLIDSSVLA |
| ET83 | VDISKLGMFELRSKLSIIPQDPVLFQGSIRKNLDPFGESDDEHLWDALRRSGLTDASILT |
| ET47 | VEISQLGLYDLRSKLAIIPQDPVLERGTIRKNLDPFGQNDDETLWDALRRSGLVEGSILN |
| ET71 | TDISKLGLHDLRSKLSIIPQDPVLFQGTIKSNLDPFNESTESELWDALRRSGLITPEEMI |
| | ::* :*: .** ::******::* *.:: ***** : **.:* : . : |
| ET72 | QVKKQQKTDAN----------------------LHKFHLDRVVEDDGSNFSLGERQLLAL |
| ET63 | LVKHQTKSDRN----------------------LHKFHLARLVEDDGSNFSLGERQLLAL |
| ET208 | QVKHQTLDDEN----------------------LHKFHLGQNVEDDGTNFSLGERQLLAL |
| ET60 | SVQSQDPKSED----------------------LNKFHLFKQVQENGTNFSLGERQLIAF |
| ET193 | VVKAQVKVQKEDKSDHGDNNNGADKKGAEEGSILHKFHLDQMVEDEGVNFSLGERQLIAF |
| ET212 | HVKTQRVGDDD----------------------FHKFHLDNEVDDEGFNFSLGEKQLVAF |
| YOR1 | EVKLQKPDENGTHGK------------------MHKFHLDQAVEEEGSNFSLGERQLLAL |
| ET120 | EVKAQSPETSGAYAN------------------MHKFHLRQEVEDDGSNFSLGERQLLAL |
| ET58 | TIKAQ----GKEDKN------------------FHKFHLDQAVEDDGSNFSLGERQLLAL |
| ET83 | TIKAQ----TKDDPN------------------FHKFHLDQIVEDEGSNFSLGERQLLAL |
| ET47 | TIKSQ----SKDDPN------------------FHKFHLDQTVEDEGANFSLGERQLIAL |
| ET71 | KMKDE----NENE--------------------YSKFHLNSVVEDEGSNFSLGERQLLAL |
| | :: : **** *:::* ******:**:*: |
| | Linker |
| ET72 | ARALVRGARILVLDEATSSVDYETDAKVQKTITEEFAQCTVLCIAHRLKTIVKYDRILVL |
| ET63 | ARALVRGSKILVLDEATSSVDYETDAKVQKTITNEFADCTVLCIAHRLKTIVKYDRIMVL |
| ET208 | ARALVRNSKILILDEATSSVDYETDSKIQTTISTEFAGCTIMCIAHRLKTIVNYDRILVL |
| ET60 | ARALVKRTKILILDEATSSVDYETDNKIQKTILKEFGTCTILCIAHRLKTIINYDRILVL |
| ET193 | ARALVRNSKILILDEATSSVDYETDAKIQNSIVNEFADCTILCIAHRLKTIINYDKILVL |
| ET212 | ARALVRDTKIIVLDEATSSVDYATDSKLQKAIVREESDRTILCIAHRLKTILHYDRVIVM |
| YOR1 | TRALVRQSKILILDEATSSVDYETDGKIQTRIVEEFGDCTILCIAHRLKTIVNYDRILVL |
| ET120 | TRALVRQSKILILDEATSSVDYETDAKIQAKIVQEESSCTILCIAHRLNTILDYDRILVL |
| ET58 | ARALVRNSRILILDEATSSVDYETDAKIQSTIKSEFSECTILCIAHRLKTILDYDKILVL |
| ET83 | ARALVRNSRILILDEATSSVDYETDAKIQNTITNEESNCTILCIAHRLKTILNYDRILVL |
| ET47 | ARALVRNSKILILDEATSSVDYETDSKIQKTISTEFSHCTILCIAHRLKTILTYDRILVL |
| ET71 | ARALVRRSKILIMDEATSSVDYKTDSLVQETIAREFSDCTILCVAHRLKTIIKYDRILVL |
| | :****: ::*:::********* ** :* * **. *::*:****:**: **:::*: |
| | Walker B |
| ET72 | DKGEIAELDTPRNLYE-QNGIFRSMCDKSGIVEDDF------ |
| ET63 | DKGEIVELGKPIELYQ-HDGIFRSMCEKSGITRADFDI---- |
| ET208 | DKGEISEEDKPWALFQDESTIFRQMCNKSGVVAEDFEKQN-- |
| ET60 | EKGEVKEFDTPWNLENTKDSIFEQMCRKSKITSDDFTIKTI- |
| ET193 | DKGEIKEFNTPWNLEKTKDSIFQQMCIKSNIVEEDFHRVSKF |
| ET212 | EQGEIKEEDTPSHLYNSTGTIFRQMCDKSGISKEDFYEW--- |
| YOR1 | EKGEVAEFDTPWTLESQEDSIFRSMCSRSGIVENDFENRS-- |
| ET120 | EQGSVAEEDTPKALFRAG-GIFTEMCQRSGITSADFKEN--- |
| ET58 | EAGEIEEFGTPMILYEND-GIFRQMCDRSDITREDFVHDL-- |
| ET83 | EQGEIEEEDTPIRLYEND-GIFKQMCERSDITREDFHIQK-- |
| ET47 | EKGEVEEEDTPRVLYSKN-GVFRQMCERSEITSADFV----- |
| ET71 | EKGELEEFDKPLDLEKKQ-GIFRDMCKISNIGVEDF------ |
| | : *.: *:..* *: :* .** * : ** |

[0465] Walker A, B and the linker regions (Katzmann, 1995; Walker, 1982) for transporters are shown in bold. Note that a high degree of conservation and conservative substitutions are present between all of the active YOR1 homologs analyzed here, near the Walker regions presumed to be involved in substrate binding and linker regions. The predicted linkers are absolutely conserved in the YOR1 homologs studied, and are regions 710-714 and 1366-1371 of the S. cerevisiae YOR1 sequence, corresponding to amino acid sequences LSGGQ and NFSLGE, respectively. The Walker A sequences are present in YOR1 at 621-627 and 1247-1253 corresponding to amino acid sequences G (S/A/L/V/M/P) IG (T/S) GK and GRTGAGK, the latter being conserved in all the YOR1 homologs shown above. Walker B sequences are found in YOR1 at 730-734 and 1387-1391, highly homologous regions with conservative substitutions amongst the YOR1 homologs above. Another observation is that the N-terminal region of >50 amino acids is not necessary for activity when these transporters are expressed in yeast.

### Example 6 Additional YOR1 Homologs Showing Efflux Activity on Glucosylated Nororipavine

[0466] ET319, ET320, ET328, ET329, ET331, ET332, ET325, and ET322 are additional YOR1 homologs and members of the ABCC/multi-drug resistance associated protein (MRP) subfamily that were tested in microtiter cultures for activity in strains producing glycosylated nororipavine, as described in Example 2. As can be seen below, ET331 has the highest total nororipavine under the conditions tested, though ET319, ET328, ET329, ET322, and ET332 all had higher production than the negative control (RPB15 plasmid only), whereas ET325 was approximately the same or slightly below the negative control. ET322 and ET328 were particularly effective at excreting glucosylated nororipavine, while ET331 appears to excrete unglycosylated nororipavine more effectively. Both types of transport are beneficial to overall production of nororipavine products. Of the 9 new YOR1 homologs tested, 8 showed similar or higher bioconversion of oripavine than the negative control; ET320 did not perform well under the conditions tested.

[0467] Table 7 below shows pairwise identity between each of the listed proteins. Similar to what has been demonstrated in Example 5, the YOR1 homologs showed sequence homology to each other as well as conserved Walker sequences.

TABLE 7
Pairwise comparison

| | ET329 | ET328 | ET332 | ET331 | ET322 | YOR1 |
|---|---|---|---|---|---|---|
| ET329 | | 83.87 | 73.80 | 58.47 | 46.02 | 42.04 |
| ET328 | 83.87 | | 73.38 | 57.13 | 46.05 | 41.75 |
| ET332 | 73.80 | 73.38 | | 57.86 | 45.19 | 41.25 |
| ET331 | 58.47 | 57.13 | 57.86 | | 44.97 | 41.09 |
| ET322 | 46.02 | 46.05 | 45.19 | 44.97 | | 41.31 |
| YOR1 | 42.04 | 41.75 | 41.25 | 41.09 | 41.31 | |

[0468] The proteins described above, were further analyzed by doing a full length multiple sequence alignment using CLC Genomics Workbench software, shown in Table 8 below. Known motifs for transporters, as described in Example 6, are designated in bold.

TABLE 8
Multiple sequence alignment of most active YOR1 homologs

| | |
|---|---|
| ET329 | M----------------------------------------------------------- |
| ET328 | M----------------------------------------------------------- |
| ET332 | M----------------------------------------------------------- |
| ET331 | M----------------------------------------------------------- |
| ET322 | M----------------------------------------------------------- |
| YOR1 | MTITVGDAVSETELENKSQN--------------------------------VVLSPKAS |
| ET329 | -----------------------------------------TELEKA--DP--PVLQK-- |
| ET328 | -----------------------------------------VELEKG--SE--PELQH-- |
| ET332 | -----------------------------------------AELEKG--DDAQPALQH-- |
| ET331 | -----------------------------------------DHESAAFSSRAPPLRQN-- |
| ET322 | -----------------------------------------DDSSLEIGNDLYKP-QK-- |
| YOR1 | ASSDISTDVDKDTSSSWDDKSLLPIGEYIVDRNKPQTYLNSDDIEKVIESDIEP--QK-- |
| ET329 | --------------------------------------RLLTPFLSKKVP---------- |
| ET328 | --------------------------------------RLLTPFLSKKVP---------- |
| ET332 | --------------------------------------RLCTPLLSKKVP---------- |
| ET331 | --------------------------------------RLLSPLFTKKVP---------- |
| ET322 | --------------------------------------RILTFLFRNKFY---------- |
| YOR1 | --------------------------------------RLFSFLHSKKIP---------- |
| ET329 | ---------------PVPLE-----D-ERPYHPKWRNPFSF-LFFTWLTPVLRRGYKRTL |
| ET328 | ---------------PVPHD-----E-DRPYHPKWRNPFSF-LEFTWLTPVLLVGYKRTL |
| ET332 | ---------------PVPRD-----E-DRPVHPKAINPFSW-FFFTWLTPVLLRGYKRTL |
| ET331 | ---------------PVPQD-----H-ERHTYPLYGNPISW-FFFTWLWPVMITGYKRIL |
| ET322 | ---------------PIPKD-----DSERKIYPEQSSNILYRVFFWWVSPLMTIGYTRIL |
| YOR1 | ---------------EVPQT-----DDERKIYPLFHTNIISNMFFWWVLPILRVGYKRTI |
| ET329 | QPEDMFKLHDQMTAEYLAGKFERIFYRRLAADKER-HLLQK---AESRGETLETSSVDSD |
| ET328 | LPEDMFKLHEGITAEHLAEKFQRIFDRRLAQDKQR-HLKEK---AKARGETLETSSVESV |
| ET332 | LPEDMFKLHDEMTVEHLAGKFQAIFDRRLAADKRK-YLKKRRQLALKKGDS-DVSARTDE |
| ET331 | EPDDLYKLNDKLKADALAARFEAIFARRLAEDKRR-HLDQTLDSSKISNSSKNSSNSPDL |
| ET322 | QPDDLWILTEDMKVEH----FYNYFVTYLQVETERAHLAHIANKCKERNESVEDSSKSRE |
| YOR1 | QPNDLFKMDPRMSIETLYDDFEKNMIYYFEKTRKKYR--------KRHPEATEEEVMENA |
| ET329 | DDFAD---YQLPKSLCFLSLYETFAWQYSLALFFGVLGMSCSTCIPLLSKELINFVSAKA |
| ET328 | DDMAD---YELSKSLCFLTLYETFARQYSLALVFATLGMSCSICIPLLSRKLINFVSEKA |
| ET332 | DLMLE---YEPSKSLCFLSLYETFLWQYSMALLFGMLGLVGQACNPLLSRKLINFVELEA |
| ET331 | DDLADLADYVPSDTLCLWSLFETFKWQYLTACFLCALAQVGWICNPLLSKKLIAYVQRKA |
| ET322 | EDLQD---FVLSPMNIATVLELTFKRQILVGLILAIFSLSGIACSPLLTKELIKFVEKRS |
| YOR1 | ---------KLPKHTVLRALLFTFKKQYFMSIVFAILANCTSGFNPMITKRLIEFVEEKA |
| ET329 | FGMDVNMGRGVGYAIGVSILIFTGDILINQGIYLSMLTGAQIRAIFTKLLLDKSFKLNTK |
| ET328 | YGFNLNMGTGVGYAIGVAILIFTGDVLINQGVYLSMITGAQIRAVFTKLLLDKSFKLNAK |
| ET332 | LGIPTKIGTGIGYAFGVAILMFVSDVLHNQGVYFAMLIGAQIRAIFTKALLDKSFKLNTR |
| ET331 | LGIESDTGKGVGYALGVSLVVFCSDILFNQMYYLSSLTGAESKAIFTKVMLDKSFRLNAR |
| ET322 | LGVHTNIGQGIGYSLGVVFMMLFSNLLFNHEMYIGQSMGALIKALLTKAVINKAFKFNAE |
| YOR1 | IFHSMHVNKGIGYAIGACLMMFVNGLTFNHFFHTSQLTGVQAKSILTKAAMKKMFNASNY |
| ET329 | SRKQFPASKITSIMSTDVSRV-DLGTGFSIYGFIFIFPVGISIGILVYNIRAPAM-VGVG |
| ET328 | SRKQFPASKITAIMSTDVSRV-DLGTGFSIYGFVFVFPVGISIGILVYNIKAPAM-VGVG |
| ET332 | SRKKEPPSKITSIMSTDVSRV-DLGTGFSIYGFVLIVPVGVSIGILIYNIKAPAM-VGVG |
| ET331 | SRRVYPVSKITSIMSTDVSRI-DLGLATAPMIIVAPVPLAISIGILIHNLKAPAL-LGIG |
| ET322 | SRHKFPQSKLISIITTDLSRV-EIAVMFQPLLLCLPIPIAIAIVILVVNIRVSAV-IGIV |
| YOR1 | ARHCFPNGKVTSFVTIDLARI-EFALSFQPFLAGFPAILAICIVLLIVNLGPIAL-VGIG |
| ET329 | LMIAFLFVAGFLSFLLFSFRQTAQKSTDARVSYMKEILNNLKMIKFYSWEIPYFKLISKI |
| ET328 | LMIAFLFVAGILGAMLFSFRKTAQKSTDARVSYMKEVLNNLKMIKFYSWEKPYFSLISKI |
| ET332 | LMLAFLFVSGGLSILLFSFRKTAQKATDSRVGYMKEVINNLKMIKFYSWEKPYHALITKI |
| ET331 | IMILFLGFAGFLGSLLFKYRKLATTQTDARVSYMKEVLNNLKMIKFYSWEKPYMAMIKAV |
| ET322 | IFIIFLGFISIGAKKLFAYRDAVSKITDKRVNEMKEILNNLKMIKFYSWEHPYHENVCRV |
| YOR1 | IFFGGFFISLFAFKLILGFRIAANIFTDARVTMMREVLNNIKMIKYYTWEDAYFKNIQDI |
| ET329 | RRR-EMAYLLRMEITRMIIITLASSLTLISSLASFLTLYGIASPSARNPADIFSSVALFN |
| ET328 | RRR-EMAYLLRMEITRMIIITLASSLTLISSLASFLTLYAIASPSSRNPADIFSSVALFN |
| ET332 | RRR-EMAYLLRMEITRMIIITLAASLALVSSLVSFLTLYAIASPSSRNPAEIFSSVSLFN |
| ET331 | REK-EMTFLLKMQVTRSIIISVAVSLSLVASFASFMLLYGTASVSKRNPASIFSSVALFN |
| ET322 | RGE-EVDMILKIQTLRNVIFSLAMTLIGICSMIAFVILYAIQG-STSSPAKMFSSVSTFE |
| YOR1 | RIK-EISKVRKMQLSRNFLIAMAMSLPSIASLVTFLAMYKV-NKGGRQPGNIFASLSLFQ |
| ET329 | MLAGQFVVLPLSLAGSTDAFLGMNRVAAVLAADEIDPNDSVHMITDSEITSMQEKKLAIS |
| ET328 | MLAGQFVVLPLSIAGSTDAFLGMNRVAAVLAADEIDPKDSVRLITDDERTAMQENKLAVS |
| ET332 | LLASQFLVLPLSIAGSTDAFLGMNRVAAVLAADEIDPEDADTILSERAQALLEEKKLAIT |
| ET331 | ILASVFINLPLAIAGATDAYIGMRRVGQYLASDE-HVEDKKRVTSETDRQLMEEKNLAIT |
| ET322 | ILGLMVFFIPQALSTTADMINGFKRIGAVLSADEEEPYEGYRELNDAS------DKRAIA |
| YOR1 | VLSLQMFFLPIAIGTGIDMIIGLGRLQSLLEAPEDDPNQMIEMKPSPGF----DPKLALK |
| ET329 | VRDCDFEWEVFN----FKEEKSEDQTKDTEELKKEKKELKQKKKEEKKANKK--SKG-SK |
| ET328 | VRDCDFEWEIFD----LKEEKTEDQTKDNKELKKEKKEMKKKKKEEKKAQKA--SK--SN |
| ET332 | VQDGEFEWELFD----FDDEKSEE----TEEHKDESKKKKMKKESKKKVKKS--TKDISD |
| ET331 | VSNANFEWEIFD----IPDE---------EKIKEEKKKQKDKEKNDKKNKKKKLSSDESS |
| ET322 | LKDASFSWDVFDDEEGEEDEADGDGDGDEEEEIEDKKDKKKAKKEKKRKEKGKDTK--SS |
| YOR1 | MTHCSFEWEDYELNDAIEEAKG--------EAKDEGKKNKKKRKDTWGKPSASTNKAKRL |
| ET329 | SPTPASEE-------------------KEAEVASFK-LHDINLDVRDGEFMVITGSIGSG |
| ET328 | SPSPEVDE-------------------KTGEVSSFK-LNNINLDVKDGEFVVITGSIGSG |
| ET332 | TSSASSNE-------------------KERK--SFK-LHNVNLDIRQGAFVVITGSIGSG |
| ET331 | HEAVTQSE-------------------KPTSAATFK-LRNIDLTIMKGEFVVVTGSIGSG |
| ET322 | FPSTSSNDIELSTIPKTSPNSKANNKGEQEEATSFPGLKNIDLTIHKGEFIVITGLVGSG |
| YOR1 | DNMLKDRD-----------------GPEDLEKTSFRGFKDLNFDIKKGEFIMITGPIGTG |
| | Walker A |
| ET329 | KSSLLYALDGTMKKNAGKLLINGSLLMCGA-PWIQNSTLRENITFGSPYDEKWYNKVVNA |
| ET328 | KSSLLHALDGTMKKNSGKLLLNGSLLMCGV-PWIQNNTLRENILFGSPYDEAWYNKVVEA |
| ET332 | KSSLLHALDGAMKKLSGDVYVNGSLLMCGT-PWIQSASLRENILFGSTYDETWYKEVIRA |
| ET331 | KSSLLLALEGSMKRNSGQVKINGSLLMCGA-PWIQSSTIRENVIFNNPYNKSWYEQVIDV |
| ET322 | KSSLLSAIAGFMSCDSGEVDINGPLLLCGA-PWIQNNTIRENIVFGKPEDQEYYDKVIYA |
| YOR1 | KSSLLNAMAGSMRKIDGKVEVNGDLLMCGY-PWIQNASVRDNIIFGSPENKEKYDEVVRV |
| ET329 | CSLDSDFDLLPAGDRTEIGERGITLSGGQKARVCLARTVYADSSIILLDDVLSAVDAKVG |
| ET328 | CSLNSDFDLLPAGDRTEIGERGITLSGGQKARVCLARTVYEDSSIILLDDVLSAVDAKVG |
| ET332 | CFLESDFDILPAGDLTEIGERGITLSGGQKARVCLARTVYANSSIILLDDVLSAVDAKVG |
| ET331 | CCMDSDLEILPAGDQTEIGERGITLSGGQKARLSLARAVYARSDIILLDDVLSAVDAKVG |
| ET322 | CALNIDLDSLEGGDYTEVGEKGITLSGGQKARINLARAVYANKEIILMDDVLSAVDARVG |
| YOR1 | CSLKADLDILPAGDMTEIGERGITLSGGQKARINLARSVYKKKDIYLFDDVLSAVDSRVG |
| | Linker Walker B |
| ET329 | RHIMSECI--LGLLKDKTVVLATHQLSLISEAESVVFLNGDGTISR-GTFDELKRINSAF |
| ET328 | KHIMNECL--LGLLKNKTRILATHQLSLISEAESVVFLNGDGSISR-GSFEELKRSNPAF |
| ET332 | KHIMSECI--MGILKGKTRVLATHQLSLISEAEHVIFLNGDGTISR-GTFEELKSTNSAF |
| ET331 | KRIVDECI--LGVLRKKTVVLATHQLSLIESADKIVFLNGDGTVDV-GTSESLRRSNEAF |
| ET322 | KHILNNCF--LGLLGSKTRVLATHQLSLIGSADRIVFLNGDGSIDV-GKMDELIARNNDF |
| YOR1 | KHIMDECL--TGMLANKTRILATHQLSLIERASRVIVLGTDGQVDI-GTVDELKARNQTL |
| ET329 | ATLM-----EHSQNNEDTEE---------DSNE-QGP--TNEKELIN------------- |
| ET328 | NTLM-----EHSRKNEDSDD---------EEEDLKGA--PDEKELIN------------- |
| ET332 | KALM-----EHNRKSEENDE---------DESEPASELEVSEKELIK------------- |
| ET331 | QKLL-----SHSTTEKYAEE---------ESSISSQTDESIKKVVVE------------- |
| ET322 | NQLM-----KFSKLEDIEEENLDVEVEEIVDEIDIGNKESKDSGEIVSVFSQNQSGIDTS |
| YOR1 | INLL-----QFSSQNSEKED--------------------EEQEAVVAGELGQLKYESEV |
| ET329 | RQL-TRQTTTQVS------EETDEKNFTE----------SDGRLIMDEERSVNAIGWDVY |
| ET328 | RQL-TRQTTTQIS------DDSNESGLPE----------GDGKLIGEEERSINAIGWDVY |
| ET332 | RQL-TKQTTTQVS------SDSVEK--VE----------LDGKLYDEEEKSVNAIGWDVY |
| ET331 | AQI-SRLTSVSST------NEKTDLQ-KQ----------NEGKLIMEEEKSVNAINADVY |
| ET322 | QEL-TRRRTRIFSKSDSDNNDSMEDNDVEYKDYNHNKDATKGKIITEEERAVNSIKFDVY |
| YOR1 | KEL-TELKKKATEMSQTANSGKI---------------VADGHTSSKEERAVNSISLKIY |
| ET329 | GKYILTGVEGFKANWLIYVVFAIT--V-LTTFLTLFTNNWLSFWISMKF----DRSDGFY |
| ET328 | GRYVLTGVDGFKLNWPVYLVFGAT--V-FTTFLTLFTNNWLSFWIQMKW----DYSDGYY |
| ET332 | GRYILTGVQGFKFNWLLFVILCLC--I-LGTFMSLFTNNWLSFWISRKF----DQSAGFY |
| ET331 | VRYIFAGIPGVKGAMIFAAVIIFS--I-LSVFFNLFTSTWLSFWVEYKWR---NRSDGFY |
| ET322 | HKYLKYGA-GKLTPWGFFTIFAVL--LTLATFCDIFTNIWLSFWIEQKFD---GKSNGFY |
| YOR1 | REYIKAAVG--KWGFIALPLYAIL--VVGTTFCSLFSSVWLSYWTENKFK---NRPPSFY |
| ET329 | GKYILTGVEGFKANWLIYVVFAIT--V-LTTFLTLFINNWLSFWISMKE----DRSDGFY |
| ET328 | GRYVLTGVDGFKLNWPVYLVFGAT--V-FTTFLILFINNWLSFWIQMKW----DYSDGYY |
| ET332 | GRYILTGVQGFKFNWLLFVILCLC--I-LGTFMSLETNNWLSFWISRKF----DQSAGFY |
| ET331 | VRYIFAGIPGVKGAMIFAAVIIES--I-LSVFFNLFTSTWLSFWVEYKWR---NRSDGFY |
| ET322 | HKYLKYGA-GKLTPWGFFTIEAVL--LILATFCDIFINIWLSFWIEQKFD---GKSNGFY |
| YOR1 | REYIKAAVG--KWGFIALPLYAIL--VVGTTFCSLFSSVWLSYWTENKFK---NRPPSFY |
| ET329 | IGLYAMFTVLAVLFMVSQFCGV-IFILNRASRILNIKAIERILHVPMSFMDTTPMGRVIN |
| ET328 | IGLYAMFTALAVMFMITQFCGV-IYILNRASRILNIKALERILHVPMAFMDTTPMGRVIN |
| ET332 | IGFYATFTGLAVILMVFQFCSI-IFVMNRASRILNIKALGKILHVPMSFMDTTPMGRILN |
| ET331 | IGFYAAFTVLALVILTFGFSGV-IYVMNLSSRTLNIRAAERILYVPMSYMNVTPMGRIIN |
| ET322 | IGFYVMFNVLWVIFLTYTFVFF-IHGTTVSSKHLNLMAIKRILHAPMSFMDTTPMGRILN |
| YOR1 | MGLYSFFVFAAFIFMNGQFTIL-CAMGIMASKWLNLRAVKRILHTPMSYIDTTPLGRILN |
| ET329 | RFTKDTDTLDNEIGDRVSMVNYFLSDLIGIIILCIIYMPWFAIAVPFIIGLFIIAATFYQ |
| ET328 | RFTKDIDTLDNEIGDRVSMVVYELSDIVGIIILCIIYMPWFAIAVPFIIGEFIILATFYQ |
| ET332 | RFTKDTDTLDNEIGDRVGMVVNETFEIWGVIIMCIIYMPWFAIAVPFIVAVFIIMANFYQ |
| ET331 | RFTKDTDVLDNEMGDRMGMIIYEASIIGGVLILCIIYLPWFAIAVPFLIVVFFGFANFYQ |
| ET322 | RFTKDTDALDNEISDNLRLFFTAIAKMIGVFILIIIYLPWFACAIPGIFVLFFLIANFYQ |
| YOR1 | RFTKDTDSLDNELTESLRLMTSQFANIVGVCVMCIVYLPWFAIAIPFLLVIFVLIADHYQ |
| ET329 | ASGREVKRLEAIQRSHVYNNFNESLSGMPTIKGFGSIGRFLQKNVSTINKMSEAYFITVA |
| ET328 | ASGREVKRLEAIQRSHVYNNFNESLIGMPTIKAFKSIGRFLEKNVKTINKMNEAYYITVA |
| ET332 | ASGREVKRLEAVQRSHVYNNFNESLTGMPTIKAFKSIQRFLNKNIATINKMDEAYFVTVA |
| ET331 | ASGREIKRLEAVQRSLVYNNFNETLTGLDTIRGYDKTDVFLSKNIRLIDKMNEAYFITVA |
| ET322 | ASNREVKRLEAILRSFVYNNVNEVLSGMNTIKAYKDESRFADLGDLLLNKANEASFVVNA |
| YOR1 | SSGREIKRLEAVQRSFVYNNLNEVLGGMDTIKAYRSQERFLAKSDFLINKMNEAGYLVVV |
| ET329 | NQRWLDVHLSMLASSFAFLISMLCVFRVF---DIGASSVGLLLSYVLQISSMISMLVVVF |
| ET328 | NQRWLDVHLSMLASSFAFLIAMLCVFRVF---NINPASVGLLLSYVLQISSTVSMLVVVF |
| ET332 | NQRWLDTYLSLLATLFALLIALLCACRVF---DIGASAVGLLVSYVLQISGLISMLVVVF |
| ET331 | NQRWLDVAVSFLATIFAIIISFLCVFRVF---KINASSVGLLLSNTLQISGIITTLVVVY |
| ET322 | NQKWIGIQLDLLAELIVLIVSLLCVNRVF---SINAAAVGLIMTYTLQVANELLNLVRTF |
| YOR1 | LQRWVGIFLDMVAIAFALIITLLCVTRAF---PISAASVGVLLTYVLQLPGLLNTILRAM |
| ET329 | TQVEQDMNSAERVIEYVYKIPQENAYQISETKPSPEWPQNGEIRFLNVDFAYREGLPLTL |
| ET328 | TQVEQDMNSAERVIEYVYKIPQEKAYEISETKPAPEWPAHGEIKFINVGFAYREGLPLTL |
| ET332 | TQVEQDMNSAERVLDYVYKIPQERPYEISETRPPPEWPQNGEIQFINVDFAYREGLPLTL |
| ET331 | TRVEQDMNSAERIIEYVDDLPQEAPYTISETTPNPSWPQQGQIDFNHVNLAYRPGLPMVL |
| ET322 | TLVENDMNSAERIIHYALKVEQEAPYKIDSSQPPPDWPQYGAVDFKNVNMKYRPGLPLVL |
| YOR1 | TQTENDMNSAERLVTYATELPLEASYRKPEMTPPESWPSMGEIIFENVDFAYRPGLPIVL |
| ET329 | KNFNADIRPHEKIGICGRTGAGKSSIMVALFRIAELTSGTIEIDGVDVRTLGLHDLRSKL |
| ET328 | KNFNVDIKPHEKIGICGRTGAGKSSIMVALFRIAELSAGSIVIDGVDISTLGLHDLRSRL |
| ET332 | RNINADIKPHEKIGICGRTGAGKSSIMVALFRIAELTSGSIMIDGIDVSTLGLHELRSNL |
| ET331 | KDFTVHIDPNEKIGICGRTGAGKSSIMVALYRMVELTSGNITIDGIDIRTLGLNNLRSKL |
| ET322 | KDFSLKIAPMEKIGICGRTGAGKSSIMTALYRISELDSGSIRIDDVDIATIGLKDLRSHL |
| YOR1 | KNLNLNIKSGEKIGICGRTGAGKSTIMSALYRLNELTAGKILIDNVDISQLGLFDLRRKL |
| | Walker A |
| ET329 | SIIPQDPVLFKGTIRKNLDPFGTKSDDELWDTLRRSDIISADKL---------------- |
| ET328 | SIIPQDPVLFKGTIRKNLDPFGTKTDEELWDTLRRADIISAETL---------------- |
| ET332 | SIIPQDPVLFKGTIRSNLDPFETKTDDELWDTLRRADIIDATSL---------------- |
| ET331 | SIIPQDPVLFQGTIRKNLDPFGSATDEQLWETLRRARIIKSEDL---------------- |
| ET322 | SIIPQDPVLFNGTIRSNLDPFGEQPDDVLWESLRRSGILTTEEVAKARAISKDSITAASG |
| YOR1 | AIIPQDPVLFRGTIRKNLDPFNERTDDELWDALVRGGAIAKDDLP--------------- |
| ET329 | ----EAVKAQKVGDD----DYNKFHLDSEVDDEGENFSLGEKQLVAFARALVRNSKILVL |
| ET328 | ----EEVKAQKPGDD----DFNKFHLDGEVDDEGENFSLGERQLVAFARALVRNTKILVL |
| ET332 | ----EHVKTQRVGDD----DFHKFHLDNEVDDEGENFSLGEKQLVAFARALVRDTKIIVL |
| ET331 | ----NEVKSQ-TDPN----KMHKFHLDRDVDVDGENFSLGEKQLIAFARALVRGSKILIL |
| ET322 | GKEGSEVESQEV-------ELPKFHLYQPVEDEGENFSLGERQLISFARALVRNAKIIIL |
| YOR1 | -----EVKLQKPDENGTHGKMHKFHLDQAVEEEGSNFSLGERQLLALTRALVRQSKILIL |
| | Linker Walker B |
| ET329 | DEATSSVDYATDSKLQKAIAREFADCTILCIAHRLKTILNYDRVMVMDQGEIKEFDTPRN |
| ET328 | DEATSSVDYATDSKLQKAIAREFSGCTILCIAHRLKTILNYDRIMVMDQGSISEFDTPTN |
| ET332 | DEATSSVDYATDSKLQKAIVREFSDRTILCIAHRLKTILHYDRVIVMEQGEIKEFDTPSH |
| ET331 | DEATSSVDYATDKILQEAIVEEFSDCTILCIAHRLKTILNYDRVMVMDQGQVVEFDKPIN |
| ET322 | DEATSSVDYGTDDKIQTTIAQEFKSCTILCIAHRLKTIINYDKILVMDKGSVREFDTPWN |
| YOR1 | DEATSSVDYETDGKIQTRIVEEFGDCTILCIAHRLKTIVNYDRILVLEKGEVAEFDTPWT |
| ET329 | LFNSRNTIFRQMCDKSGISTSDFGA--- |
| ET328 | LFNSTSSLFRQMCDKSGISQFDFEE--- |
| ET332 | LYNSTGTIFRQMCDKSGISKEDFYEW-- |
| ET331 | LFKKQGTFF-QMCEKAGINEKEFGH--- |
| ET322 | LFNSNGSVFREMCEKSNIVAEDFKRR-- |
| YOR1 | LFSQEDSIFRSMCSRSGIVENDFENRS* |

[0469] In this case, the first part of the Walker A sequences have some conservative substitutions at the third and fifth amino acid residues in addition to the previous wobble allowed at position 2 resulting in a motif of: G(X)(I/V)G(S/T)GK (where X=P, L, S, A, V, M).

[0470] The second Walker A sequence is absolutely conserved as before, as GRTGAGK. The first linker region is still absolutely conserved as LSGGQ. The second linker region is also absolutely conserved as NFSLGE. The Walker B sequences observed with the new YOR1 homologs in Table 8 and the previous ones from example 5 are (I/V/T)(I/Y/V)L(M/F/L)D and I(I/L)(I/V)(L/M)D with conservative hydrophobic substitutions at the residues in parentheses.

### Example 7 Another Class of ABC Transporters for Efflux of Nororipavine and Glucosylated Nororipavine

[0471] PDR5, like YOR1, is an ABC transporter involved in drug/xenobiotic efflux. PDR5 belongs to ABCG/pleiotropic drug resistance (PDR) subfamily of ABC transporters and YOR1 belongs to ABCC/multi-drug resistance associated protein (MRP) subfamily (Kumari 2021).

[0472] Overexpression of S. cerevisiae PDR5, was observed to increase overall conversion of oripavine into nororipavine products, although excretion of glucosylated nororipavine did not appear to be improved by expression of PDR5 as compared to a plasmid only control. Not being bound by theory, it was hypothesized that PDR5 benefits production of BIAs such as nororipavine and glucosylated nororipavine by excreting the BIA (in this example nororipavine aglycone) more efficiently and not taking it back into the cell very efficiently. Additional PDR5 homologs that are members of the ABCG/pleiotropic drug resistance (PDR) subfamily of ABC transporters, were also tested in microtiter plates as described in Example 2, at pH 5.5. As can be seen below in FIGS. 7a and b, in some cases the concentration of glucosylated nororipavine is actually lower than the no transporter (plasmid RPB15) control, which is consistent with nororipavine excretion being efficient and lower levels of nororipavine being available inside the cell for glucosylation. For example see the ET291 data below. ET291 appears to be an efficient oripavine excreter as well, which makes the total bioconversion lower than the control (plasmid only). PDR5 and ET304 performed the best, under the conditions tested, though several other transporters also appeared to have bioconversion activity above that of the control such as ET289, ET290, and ET287.

[0473] Similar assays in microtiter plates were conducted again using strains transformed with empty plasmid RPB15 as a negative control, and several more PDR5 homologs (in addition to PDR5 as a positive control). (see FIG. 7b). Under the conditions tested, ET282 and PDR5 had the highest level of bioconversion, with an improvement of over 10 percent compared to the no transporter control. ET303, ET252 and ET274 had activity at the same level or slightly higher than the negative control; and ET270, ET301 and ET268 appeared to have lower activity than the negative control under the conditions assayed, for production of nororipavine and nororipavine-glu.

[0474] A third set of assays was conducted in a similar manner as above, in which ET265 and ET299 transporters appeared to have higher activity than PDR5 for bioconversion of oripavine to nororipavine-containing products, and ET293 had higher activity than YOR1, but lower activity than PDR5, for total bioconversion or oripavine to nororipavine-containing products.

### Example 8 Sequence Alignment PDR 5 Homologs

[0475] PDR5 and homologs that showed higher bioconversion of oripavine to nororipavine+nororipavine-gly and/or better excretion of product were compared by NCBI's blastp program choosing the ‘align two or more sequences’ function. PDR homologs ET306, ET304, ET299, ET293, ET289, ET287, ET291, ET290, ET282, and ET265 were between 56.48-75.48% identical when compared to PDR5, over >97% of sequence of the PDR5 sequence length. See Table 9 below, a pairwise comparison of the full length proteins. The PDR5 homologs with desirable enzymatic properties are all >50% identical.

TABLE 9

| | ET287 | ET289 | ET290 | ET291 | ET293 | ET265 | PDR5 | ET282 | ET299 | ET304 | ET306 |
|---|---|---|---|---|---|---|---|---|---|---|---|
| ET287 | | 83.70 | 78.91 | 75.82 | 70.52 | 61.86 | 62.85 | 61.47 | 62.66 | 54.67 | 52.65 |
| ET289 | 83.70 | | 79.64 | 77.98 | 71.33 | 63.03 | 63.81 | 61.76 | 63.18 | 54.85 | 52.61 |
| ET290 | 78.91 | 79.64 | | 79.12 | 72.38 | 62.65 | 64.12 | 61.97 | 63.01 | 56.15 | 53.21 |
| ET291 | 75.82 | 77.98 | 79.12 | | 71.85 | 61.77 | 63.48 | 60.97 | 62.49 | 54.39 | 52.25 |
| ET293 | 70.52 | 71.33 | 72.38 | 71.85 | | 64.90 | 64.99 | 62.11 | 63.99 | 55.65 | 53.92 |
| ET265 | 61.86 | 63.03 | 62.65 | 61.77 | 64.90 | | 75.33 | 69.52 | 61.52 | 54.83 | 54.30 |
| PDR5 | 62.85 | 63.81 | 64.12 | 63.48 | 64.99 | 75.33 | | 69.70 | 62.34 | 54.96 | 52.64 |
| ET282 | 61.47 | 61.76 | 61.97 | 60.97 | 62.11 | 69.52 | 69.70 | | 59.23 | 53.18 | 51.39 |
| ET299 | 62.66 | 63.18 | 63.01 | 62.49 | 63.99 | 61.52 | 62.34 | 59.23 | | 55.94 | 53.90 |
| ET304 | 54.67 | 54.85 | 56.15 | 54.39 | 55.65 | 54.83 | 54.96 | 53.18 | 55.94 | | 68.77 |
| ET306 | 52.65 | 52.61 | 53.21 | 52.25 | 53.92 | 54.30 | 52.64 | 51.39 | 53.90 | 68.77 | |

[0476] Multiple sequence analysis using Clustal O v 1.2.4 (ebi.ac.uk) was performed as well, to look for conserved functional regions of the proteins with desirable properties. Table 10 shows the conserved regions of the sequence (asterisk is absolute conservation, two dots indicates highly conservative substitutions, and one dot indicates a conservative substitution).

TABLE 10
CLUSTAL O(1.2.4) multiple sequence alignment

| | | |
|---|---|---|
| ET306 | -------------------------MSNSAYDIEDHPEEVNKYDGYNNAVDSEVQRLARQ | 35 |
| ET304 | -----------MTEN----------IHLGDQVSKTSAQSVEEYKGFDSNVDDNIQHLARK | 39 |
| ET299 | -------------------------------MDNESTDSLVEYQG-DNKVENQIRDLART | 29 |
| ET293 | --------------------------------MSQEHSDQSL---YDGPNKKEIRDLART | 25 |
| ET289 | ----MSLGTTHLPEALAAN----HEAAAATSNNSEPDSFHPEYRGFEDQAQDHVRNLART | 52 |
| ET287 | ----MSLGTSHVPEALAAE----LEAVR---NRDESSSTAEKYEGLDSHAKDSVRDLARS | 49 |
| ET291 | ----MKANKSNMA---GDP----HGSCDSAVLTRNTSPELPEYDGLDCSARASVRELART | 49 |
| ET290 | MVDNVAPNGASYQ---NNN----IGNEMAADDISEQASSPGVYRGFEgAQQSVRNLARS | 53 |
| ET282 | -----------------------MVVG-SVEQHPGGYSDENAYGGFDEAINGSVKELARS | 36 |
| PDR5 | -----------MPEAKLNNNVNDVTSYSSASSSTENAADLHNYNGFDEHTEARIQKLART | 49 |
| ET265 | -----------MSEK-----KDIIDSGAMSQVDESSSLNLQSYDGFDQNAQDKIRQLARS | 44 |
| | : :: *** | |
| ET306 | ITQNSQLSFQDDG------FKLAPGESNIDGLSRVSTIAPGVNPMQNVEELDPRLDPNSE | 89 |
| ET304 | LTNASQSSLPAAAGEDQQYYQNNNDLEAQQSLSRVSTIAPGVVAINN-PDIDPRLDPNSD | 98 |
| ET299 | LSRASLKEQGSNH---DLVSGAADDDTRSIFSTKYEGVNP-VFSDANAPGYDARLDPNSD | 85 |
| ET293 | LTAASVAV----------------------SGNSDAAVNP-LAAQPGEPGYNARLDPNSD | 62 |
| ET289 | LTNASAPG----------------------SVASMSPINP-VFSTPDAPHYDARLDPNSD | 89 |
| ET287 | LTHEGAAA----------------------ADGSESPVNP-VFSDPNAPDYDARLDPNSD | 86 |
| ET291 | FTNGSVASNSKAAAVGVHATTALPASRITTEYGDVNTTNP-VFSSSELPSYNSRLDPNSD | 108 |
| ET290 | LTNRSGD--------------------AVSMAADWNTINP-VFSTVESPSYDPRLDPNSD | 92 |
| ET282 | LIEENKDSTNSF-------------SERENTVENNTGINP-VGLQPSDAEYKPELDPSSN | 82 |
| PDR5 | LTAQSMQNSTQSAPNKS--------DAQSIFSSGVEGVNP-IFSDPEAPGYDPKLDPNSE | 100 |
| ET265 | LTNQSSTTH------NN--------DAA-SLFSNVKGVNP-VFTDPSNPEYDERLDPESE | 88 |
| | : . * : . .***.*: | |
| ET306 | EFQSRYWIKNFKALMDKDPDHYKNYSLGVTEKNLRASGEASDADYQTTIINAPFKIAKQY | 149 |
| ET304 | QFNSRFWVKNFKNLMDKDPEHYKSYSLGIAYKNLRATGEAAGADYQTTVMNAPLKYANLA | 158 |
| ET299 | NFSSAAWIRNMVALAGCDPEYYKHYTISCCWKDLRAFGDPTDVAYQSTMVNMPQKIESQV | 145 |
| ET293 | EFSSEAWVRNLSHLTAENPDYYKPFSLGCAWKNLRAYGDSTDVAYQSTVANLPWKLLQFG | 122 |
| ET289 | EFSSAFWVHNVSQLVARDPDHYKPYSLGCSWRNLRAYGNATDVAYQSTVANLPLQLAETV | 149 |
| ET287 | EFSSAFWVRNLSELVRQDPDHYKPYSLGCSWRNLRAYGNATDVAYQSTVVNIPVQLVETV | 146 |
| ET291 | EFSSALWVKNLSQLIASDPDHYKPYSLGCTWKNLRAYGNATDVAYQSTFANLPLQLLESG | 168 |
| ET290 | EFSSSLWVQNLSQLVSSNPDHYKPYSLGCSWRNLRAYGNSTDVAYQSTVVNLPLQLVEYV | 152 |
| ET282 | DFSSKAWIGNLAKVVVSDPDYYKPYTVGCGWRNLSALGASADVAYQTTVDNMPWKILSWL | 142 |
| PDR5 | NFSSAAWVKNMAHLSAADPDFYKPYSLGCAWKNLSASGASADVAYQSTVVNIPYKILKSG | 160 |
| ET265 | NFSSTAWVKNMANLTAADPDYYKPYSLGCVWKDLTASGDSSDVVYQSTVFNMPTKLLKTA | 148 |
| | :*.* *: *. : :*:.** :::. :::* * * :.. **:*. : : : . | |
| ET306 | AKAVFSTRSAKQANRFDILKSLDGIVRPGEVLVVLGRPGSGCTTYLKSIASNTHGFKIGQ | 209 |
| ET304 | KKAFFTSKAKKEAGRFDILKSMDALVRPGEVVVVLGRPGSGCSTLLKTIASNTHGFAIGE | 218 |
| ET299 | KR---SLCKPKDEQVFDILKPMDGLLKAGELLVVLGRPGSGCSTLLKTISANVQGYHLDE | 202 |
| ET293 | YR---CVRKSRPSDKFDILKSMDGILNPGELLVVLGRPGSGCSTLLKSISSNTHGFKVAP | 179 |
| ET289 | LR---MARKARPEDTFDILKPMDGLVKPRELLVVLGRPGSGCSTLLKTVSANTHGFHVDP | 206 |
| ET287 | YR---MARKARPEDTFNILKPMDGLVKPRELLVVLGRPGSGCSTLLKTVSANTHGFHVDP | 203 |
| ET291 | YR---AARKARPEDSFDILKPMDGIVKPSELLVVLGRPGSGCSTLLKSISANTHGFHIDS | 225 |
| ET290 | YR---AARKARPEDTFDILKPMDGMVKPGELLVVLGRPGSGCSTLLKSISSNTHGFHIDK | 209 |
| ET282 | YR---MARPAKESDTFEILKPMDGLVKPGELLVVLGRPGSGCTTLLKSISSNTHGFKIPK | 199 |
| PDR5 | LR---KFQRSKETNTFQILKPMDGCLNPGELLVVLGRPGSGCTILLKSISSNTHGFDLGA | 217 |
| ET265 | FR---KARPAKESDTFQILKPMEGCINPGELLVVLGRPGSGCTILLKSISSNTHGFNVGK | 205 |
| | : : *:*** ::. :. *::**********:* **::::*.:*: : | |
| | Walker A | |
| ET306 | ESEMSYEGLTQKEIKKHFRGEVVYNAESDIHFPHLTVWQTLTTAAKFRTPENRIPGISRE | 269 |
| ET304 | EAEISYEGLSPKDIRKHYRGEVVYNAESDIHFPHLTVWQTLSTVAKFRTPQNRIPGISRE | 278 |
| ET299 | KSIVSYNGLDAKTIGKHYRGEVVYNAESDVHFPHLSVFETLYNIALLVTPSNRVKGVSRE | 262 |
| ET293 | ESEIRYDGLTPKEIAKHYRGQVVYNAESDVHFPHLSVFDTLKTIALLSTPANRIEGMDRE | 239 |
| ET289 | KSQISYDGLTPKDVARHYRGEVVYNAESDVHFPHLTVFDTLKIVARLSCPSNRIHGVDRE | 266 |
| ET287 | ESRISYDGLSPKEVAKHYRGEVVYNAESDVHFPHLTVFQTLKTVARLACPSNRIHGVDRE | 263 |
| ET291 | DSEIFYDGMDPKEIAKHYRGEVVYNAESDVHFPHLTVFDTLKTVARLSCPSNRFHGVDRE | 285 |
| ET290 | ESEISYDGLSPKEISRHYRGEVVYNAEADVHFPHLSVFDTLKTVARLACPINRIQGVDRE | 269 |
| ET282 | DATISYSGLSPKDIINHFRGEVVYCPEADIHLPHLTVFQTLLTVARLKTPRNRIRGVSRE | 259 |
| PDR5 | DTKISYSGYSGDDIKKHFRGEVVYNAEADVHLPHLTVFETLVTVARLKTPQNRIKGVDRE | 277 |
| ET265 | DSTISYNGLIPKAINRHYRGEVVYNAESDVHLPHLTVFETLYTVARLKTPSNRVQGVDRD | 265 |
| | .: : *.* . : .*:**:*** *:*:*:***:*::** . * : * **. *:.*: | |
| ET306 | DYANALTEVFMATYGLSHTKNTKVGSELVRGVSGGERKRVSIAEVSLAGARLQCWDNATR | 329 |
| ET304 | DYANHLTEVYMATYGLSHTKNTKVGNENVRGVSGGERKRVSIAEVSLSGARLQCWDNATR | 338 |
| ET299 | DFAKHVTEVAMATYGLSHTKDTKVGNELVRGVSGGERKRVSIAEVTICGSRFQCWDNATR | 322 |
| ET293 | TYAKHVTEVYMATYGLSHTRNTKVGNDLVRGVSGGERKRVSIAEVAICGSKLQCWDNATR | 299 |
| ET289 | TFSTHITEVAMATYGLSHTRNTKVGNELVRGVSGGERKRVSIAEVSICGSKFQCWDNATR | 326 |
| ET287 | AFSTHITEVAMATYGLSHTRNTKVGNELVRGVSGGERKRVSIAEVSICGSKFQCWDNATR | 323 |
| ET291 | TFATHITEVAMATYGLSHTRNTKVGSELVRGVSGGERKRVSIAEVSICGSKFQCWDNATR | 345 |
| ET290 | TFATHITEVAMATYGLSHTRNTKVGNELVRGVSGGERKRVSIAEVSICGSKFQCWDNATR | 329 |
| ET282 | AWARHVTEVIMATYGLSHTRNTKVGNELVRGVSGGERKRVSIAEVTICGSKFQCWDNATR | 319 |
| PDR5 | SYANHLAEVAMATYGLSHTRNTKVGNDIVRGVSGGERKRVSIAEVSICGSKFQCWDNATR | 337 |
| ET265 | TYAKHLTDVTMATYGLSHTRNTKVGNDLVRGVSGGERKRVSIAEVTICGSKFQCWDNATR | 325 |
| | :: :::* *********::****.: *****************::.*:::******** | |
| | S-region Walker B | |
| ET306 | GLDAATALEFIRALRTSADVLDTTALIAIYQCSQEAYDLFDKVSVLYEGYQIFFGRADKA | 389 |
| ET304 | GLDAATALEFIRALRTQADVLDTTAFVAIYQCSQDAYDLFDKVTVLYEGHQIYFGRGDEA | 398 |
| ET299 | GLDSATALEFIRALKTSTAISGSTGVIAIYQCSQDAYDLFDKVCVLHEGYQIYYGSAKEA | 382 |
| ET293 | GLDSATALEFIKALRVNAQMINTSGVIAIYQCSQDAFDLFDKVCVLHEGYQIYYGPASEA | 359 |
| ET289 | GLDSATALEFIRALRTEAKLTHSAAVIAIYQCSQDAYDLFDKVSVLHEGYQIYFGPANQA | 386 |
| ET287 | GLDSATALEFIRALRTQAKLTASAAVIAIYQCSQDAYDLFDKVSVLHEGYQIYFGPAKDA | 383 |
| ET291 | GLDSATALEFIRALRTTAKLNNSAGVIAIYQCSQDAYDLFDKVCVLHEGYQIYFGPANEA | 405 |
| ET290 | GLDSATALEFIRALRTQAKMTRSSAVIAIYQCSQDAYDLFDKVSVLHEGYQIYFGRAKEA | 389 |
| ET282 | GLDAATALEFVRALKTQTEIVHSAGCVAIYQCSQDAYDLFDKVCVLHGGYQIFFGPATKA | 379 |
| PDR5 | GLDSATALEFIRALKTQADISNTSATVAIYQCSQDAYDLFNKVCVLDDGYQIYYGPADKA | 397 |
| ET265 | GLDSATALEFIRALKTQATLINTAATIAIYQCSQDAYDLFDKVCVLYGGYQIFYGSAQKA | 385 |
| | ***:******::**:. : : ::. :*******:*:***:** ** *:**::* . .* | |
| ET306 | KEYFINMGWECPPRQTTADFLTSVTSPRERVPRAGFE---KKVPRTPSEFATYWKASPEY | 446 |
| ET304 | REYFIKMGWYCPQRQTTADFLTSVTSPRERVPQEGFE---NKVPKTPQEFETYWKNSPEY | 455 |
| ET299 | KGYFERMGYESPSRQTTADFLTAVINPAERIPNEAFVKEGRYIPSTAKEMEEYWRNSPEY | 442 |
| ET293 | KQYFEDMGYVSPERQTTADFLTAVINPAERIMNQEFIKQNKFIPRTAEEMEKHWRNSSNY | 419 |
| ET289 | KQYFETMGYVCPSRQTTADFLTAVINPAERIV-----REGCRPPATAVEMEKYWKQSPDY | 441 |
| ET287 | KAYFERMGYVCAPRQTTADFVTAVINPAERQV-----RAGARPPASAVDMETYWKQSPEY | 438 |
| ET291 | KQYFLDMGYVSPDRQTTADFLTAVTNPAERIVNQEMVQAGKVVPSSASEMEAHWKQSENY | 465 |
| ET290 | KQYFQDMGYVCPDRQTTADFLTAVINPAERILNEDMVKAGKKIPLTAAEMEAHWKQSEAY | 449 |
| ET282 | KSYFERMGYYCPSRQTTADFLTSVISPAERIINREFTEKGIAVPQTAEEMSDYWRNSPEY | 439 |
| PDR5 | KKYFEDMGYVCPSRQTTADFLTSVTSPSERTLNKDMLKKGIHIPQTPKEMNDYWVKSPNY | 457 |
| ET265 | KKYFETMGYQCPERQTTADFLTSVTSPAERVINPDFIGRGIQVPQTPEDMNNYWRNSPEY | 445 |
| | : ** **: . *******:*:**.* ** * : :: :* * * | |
| ET306 | KALIAEIDESLAANQKSELKDLIYDAKASRQSKRMRKTDPYTVSISLQTKYLLEREVYRI | 506 |
| ET304 | AKLIKDIDSEFKHQHEQNSKGLVKEAHNKKQAKHIRPTSSYTVSFWMQTRYLLTRDFQRI | 515 |
| ET299 | AALRQEIEAELSKDSTE-ARQELLDAHVARQSKRQRKSSPYIVNEGMQVKYLTMRNFLRI | 501 |
| ET293 | KRLIGQIDECFARDSDK-AKQELQDAHTAKQSKRSRPSSPYTVSYGMQVKYLLRRNIQRI | 478 |
| ET289 | KRLLGEIDEYAAHEQAD-NMRNLAENHVAKQSRRARPKSPYTVSYGLQVKYLLIRNMQRI | 500 |
| ET287 | AQLLQDIDEYEASGG-N-SKEQLAANHVAKQSRRARAASPYTASFWLQVKYLLIRNMQRI | 496 |
| ET291 | KRLINEIDHYTTHDQTG-NREQLRNAHIAKQSKRARHSSSYTVSYGLQVKYLLIRNMQRI | 524 |
| ET290 | KGLLQEIDYYSTHDQAN-NRQQLKEAHVAKQSKKARAQSPYTVSYGLQVKYLLIRNMQRI | 508 |
| ET282 | QELIAEVDETISQDHEK-SLEVIQESHNARQSKRARRAEPYTVSYFMQVKYLMIRNFWRI | 498 |
| PDR5 | KELMKEVDQRLLNDDEA-SREAIKEAHIAKQSKRARPSSPYTVSYMMQVKYLLIRNMWRL | 516 |
| ET265 | KELINEIDTHLANNQDE-SRNSIKEAHIAKQSNRARPGSPYTVNYGMQVKYLLTRNVWRI | 504 |
| | * ::: : : :*:.: * . * .. :*.:** *:. *: | |
| ET306 | KNNFGFHGFSAIANSLMALVLASIFYNMSK--TTESFYSRGAAMFFACLFNGFQSFLEIL | 564 |
| ET304 | WNDFGENSFQVFANSFMALILSSIFYNLPK--TIDSFYYRGAAMFFAVLFNGFSSFLEIM | 573 |
| ET299 | KKSYGITVGTIAGNTAMALVLGSIFYKSMQDTTTATFFYRGAAMFIAVLFNAFASMLEIF | 561 |
| ET293 | RSDAGVTIFQVVGNAAMAFILGSMFYKILKHDDTAGFYSRSGALFFAVLFNAFSCLLEIF | 538 |
| ET289 | RSNMGVTVFQVIGNGSMAFILGSMFYKVLKHDTTEGFYSRAGALFFAVLFNAFSCLLEIF | 560 |
| ET287 | RSNMGVTAFQVIGNGSMAFILGSMFYKILKHDNTAGFYSRAGALFFAVLFNAFSCMLEIL | 556 |
| ET291 | RSSMGVTLFQVIGNGGMAFILGSMFYKILKHDTTAGFYSRAGALFFAVLFNAFSCLLEIL | 584 |
| ET290 | RNNMGITLFQVIGNGGMSFILGSMFYKALKHDDTAGFYSRAGALFFAVLFNAFSCMLEIL | 568 |
| ET282 | INSSSITVFQIIGNSVMALLLGSMFYKVLKKSSTGTFYYRGAAMFFAILFNAFSSLLEIF | 558 |
| PDR5 | RNNIGFTLFMILGNCSMALILGSMFFKIMKKGDTSTFYFRGSAMFFAILFNAFSSLLEIF | 576 |
| ET265 | KNNSSVQLFMIFGNCGMAFILGSMFYKVMKHDSTSTFYYRGAAMFFAILFNAFSCLLEIF | 564 |
| | .. .. .* *:::*.*:*:: : * *: *..*:*:* ***.* .:***: | |
| ET306 | SLFEARPIIEKHKQYALYHPAAEALASVISQLPFKAFSSLMFNLIYYFMVNFRRDPGREF | 624 |
| ET304 | TLFEARPIIEKHKQYSLYHPSANALSSVLSQLPAKIFTSIAFNLVFYFMVNFRRNPGRFF | 633 |
| ET299 | SLYEARPIIEKHRRYSLYHPSADALASMLSELPSKIVTAICFNLILYFMVNFRREPGPFF | 621 |
| ET293 | ALYEARPISEKHKRYSLYHPSADALASVISEIPAKIVTAICFNIALYFLCNLRQSAGAFF | 598 |
| ET289 | ALYEARPVSEKHKRYSLYHPSADAMASVISEVPAKLLTSVSFNLALYFLCNFKREAGAFF | 620 |
| ET287 | ALYEARPISEKHKRYSLYHPAADAMASVISEIPAKLVTSVAFNLALYFLCNFKREAGAFF | 616 |
| ET291 | ALYEARPISEKHKRYSLYHPSADALASVISEIPSKLVTSVVFNLALYFLCNFKREAGAFF | 644 |
| ET290 | ALYEARPISEKHKRYSLYHPSADAMASVISEIPAKLLTSLTFNLAMYFLCNFKREAGAFF | 628 |
| ET282 | SLYEARPVTEKHKTYSLYRPSADAFASVLSEIPAKVLTAVCFNIAFYFLVNFRRDAGRFF | 618 |
| PDR5 | SLYEARPITEKHRTYSLYHPSADAFASVLSEIPSKLIIAVCFNIIFYFLVDFRRNGGVFF | 636 |
| ET265 | SLYEARPITEKHRSYSLYHPSADAFASIFSEIPTKIIIAIGFNIIYYFLVNFERNGGVFF | 624 |
| | :*:****: ***: *:**:*:*:*::*::*::* * . :: **: **: ::.:. * ** | |
| ET306 | FYLLANVISTFTMSHFFRLIGSMSSTLPQALVPGHIVLLGLSMFVGFTIPVNYMLGWCRW | 684 |
| ET304 | FYYLVNLTATFSMSHLFRLVGSAATSLPEALVPAQVLLLALTIFVGFTIPVNYMLGWSRW | 693 |
| ET299 | FYFLMNFLATLVMSAIFRCVGSATKTLSEAMVPASCLLLAISLYVGFSIPKKDLLGWSRW | 681 |
| ET293 | FYFLMNMVATFAMSHIFRCLGAATKTESEAMVPSSLLLLSMAIYTGFAIPKTKMLGWSKW | 658 |
| ET289 | FYFLMTMVATFLMSHIFRCLGASTKTYAESMVPASVLLLALSIYTGFAIPKTKILGWSKW | 680 |
| ET287 | FYFLMTMVATFLMSHIFRCLGASTKTYAESMVPASVLLLGLAIYTGFAIPKTKILGWSKW | 676 |
| ET291 | FYFLMTIVATFLMSHIFRCLGAATKTYAESMVSASLILLAQALYTGFAIPKTNILGWSKW | 704 |
| ET290 | FYFLMTMVGTFAMSHIFRCLGASTKTYAESMVPASLLLLALAIYTGFAIPKTKILGWAKW | 688 |
| ET282 | FYFLINIIAVFVMSHMYRCVGSLINTLTEAMVPASILLLAMAMYTGFAIPKTKMLGWSKW | 678 |
| PDR5 | FYLLINIVAVFSMSHLFRCVGSLIKTLSEAMVPASMLLLALSMYTGFAIPKKKILRWSKW | 696 |
| ET265 | FYWLINIVAVFAMSHLFRTVGSLTKTLSEAMIPASMLLLAMSMETGFAIPKTKMLGWSKW | 684 |
| | ** * .. ..: ** ::* :*: :.: :::: . :**. :::.**:** . :* *.:* | |
| ET306 | INYINPLAYAFEALMANEFHGLRYACSAFLPDNPDNHPDWPAKSWICNAVGAVAGEATVS | 744 |
| ET304 | INYLDPLAYAFEALMANEFAGVTYDCSSFVPGDPRSIPNIPSDGFICNAVGAQTGEFTVD | 753 |
| ET299 | IWYINPLSYIFESLMINEFVGRDFPCATFVPSGAGY-EDIGSLERVCNTVGAVPGNPRVS | 740 |
| ET293 | ISYIDPLSYIFESLMVNEFHGRKFQCSVYVPTGPAY-ANATGTERVCSAVGAVPGQDYVL | 717 |
| ET289 | IWYINPLSYVFESLMVNEFHDRRFDCSAYIPTGPAY-ESISGTERVCSAVGAVPGQDYVN | 739 |
| ET287 | IWYINPLSYVFESLMVNEFHGRRFACYAYIPTGPGY-LDVTGTEHVCSAVGAVPGQNYVD | 735 |
| ET291 | IWYINPLSYIFESLMVNEFHGRNFSCSQYIPAGSGY-EILSGTERVCSAVGAVPGQDFVS | 763 |
| ET290 | IWYINPLSYIFESLMVNEFHGRQFKCSQFVPAGPGY-ENVSGTQRVCSAVGALPGEDYVS | 747 |
| ET282 | IWWINPLSYLFESLMGNEFHDQKFPCTTFVPRGGDY-DHVTGTERVCSVVGSKAGQDYVL | 737 |
| PDR5 | IWYINPLAYLFESLLINEFHGIKFPCAEYVPRGPAY-ANISSTESVCTVVGAVPGQDYVL | 755 |
| ET265 | IWYINPIAYLFESLMINEFHGRRFECAAFIPSGPAY-SNITATERVCAVSGSVAGQSYVL | 743 |
| | * :::*::* **:*: *** . : * ::* . . :* . *: *: * | |
| ET306 | GDAYLDAAYSYSNSHKWRNWAITFAFCIFFLATYMIFAEYNESAKQKGEILLFQRSTLKK | 804 |
| ET304 | GTTYLEVAYKYKNSHRWRNWGITLAFALFFLAIYLVESEYNESAMQKGEVLLFQRSTLRK | 813 |
| ET299 | GLAFIEQTYGYSASHRWRSLGIGIAFFIFFTAFYLLFCEFNESAVQKGEILLFPKSVLKS | 800 |
| ET293 | GDDYLRLSYNYLHKHKWRGFGIGMAYVVFFLGVYLAFTEFNESARQRGEVLVFTRESLKK | 777 |
| ET289 | GETYINVAYGYYHSHKWRGLGIGLAYAIVFLGVYLAVTEFNESAKQRGEILVFPQAIMRR | 799 |
| ET287 | GETYINVAYGYYHAHKWRGLGIGLAYAIFFLGVYLAVVEFNESAKQRGEILVFPHWAMAR | 795 |
| ET291 | GETYINVAYGYYHAHKWRGLGIGLAYAIVFLAVYLAVTEFNESAKQRGEILVFPQSVMRR | 823 |
| ET290 | GERYINVAYNYYHSHKWRGLGIGLAYAIFFLGVYLAVTELNESAKQRGEILVFPQAVMRR | 807 |
| ET282 | GDDYLKESYGYLIKHKWRGFGVGMAYLIFFFFLYLFLCEVNEGAKQKGEILVFPRSIVRK | 797 |
| PDR5 | GDDFIRGTYQYYHKDKWRGFGIGMAYVVFFFFVYLFLCEYNEGAKQKGEILVFPRSIVKR | 815 |
| ET265 | GDDYIRVSYDYLHKHKWRGFGIGMAYAIFFLFAYLVVCEYNEGAKQKGEMLVFPQSVLRK | 803 |
| | * :: :* * .:**. .: :*: :.* *: . * **.* *:**:*:* : : | |
| ET306 | LKKEHKAAKNDIEGGK------------------------LRDITEQDHDEESE------ | 834 |
| ET304 | LKKEKAASQNELESGN------------------------EKGVVPN--GEDVD------ | 841 |
| ET299 | KRRQLSKSKND----------------------IETADDPEGGVTDQKLLQDSLEESNVS | 838 |
| ET293 | MKRAKKLESARGD--------------------AENSAGMETGINEKKLLEESGESS--- | 814 |
| ET289 | MKKQRHRSEKNNGGGARGSETTGGGGGGGSAADLESSAG-VVPVNEKKLLEDSTDSA--- | 855 |
| ET287 | MKKQRRLRAAG---ADPADEEHGGASS---------------GTTEKKMLEDSAEDD--- | 834 |
| ET291 | MKKERKLRNSSDY----------------SGTDVENSAG-SAPLNEKKMLDESSVSA--- | 863 |
| ET290 | MKKQRKLRAGTNA----------------NGSDIENTAG-VATLNEKKMLEESSNSV--- | 847 |
| ET282 | MRKQNKLKEEDR-DP----------------EDVEKIAG-SSGSTDKMLLKDSSESI--- | 836 |
| PDR5 | MKKRGVLTEKNANDP----------------ENVGERS--DLSSDRKMLQESSEE-E--- | 853 |
| ET265 | LRKEGQLKKDS--------------------EDIENGS--NSSTTEKQLLEDSDE-G--- | 837 |
| | :: : .. | |
| ET306 | -------QHVDAIQAGKDIFHWRDVHYTVKIKSEYREILSGVDGWVKPGILTALMGASGA | 887 |
| ET304 | -------KDVDVIHAGTQTFHWRDVHYTVKIKKEDREILSGVDGWVKPGILTALMGASGA | 894 |
| ET299 | SSSEKSANANVGLSKSEAIFHWRNVCYDVQIKKETRRILSNVDGWVEPGTLTALMGSSGA | 898 |
| ET293 | TSS----FQDVKLSQTEAIFHWRNVCFDVKIKKEDRRILNNVDGWVKPGILTALMGSSGA | 870 |
| ET289 | NSTNSSMGE-AGLTQSEAIYHWRNVCFDVPIKKETRRILDHVDGWVKPGTLTALMGASGA | 914 |
| ET287 | DASAGASADAGLISSSNAIFHWRNVCFDVAIKKETRRILDHVDGWVKPGTLTALMGASGA | 894 |
| ET291 | GST-SSMGD-AKLSKSEAIYHWRNVCFEVNIKKETRRILNNVDGWVKPGILTALMGASGA | 921 |
| ET290 | ASS-SSMGD-VKLSSSEATFHWKNVCFEVPIKKETRRILDNVDGWVKPGTLTALMGASGA | 905 |
| ET282 | DEE----NEPSALGGSQAIFHWRNLCYEVQIKGDTRRILNNVDGWVKPGTLTALMGASGA | 892 |
| PDR5 | SDT----YGEIGLSKSEAIFHWRNLCYEVQIKAETRRILNNVDGWVKPGILTALMGASGA | 909 |
| ET265 | SSN----GDSTGLVKSEAIFHWRNLCYDVQIKDETRRILNNVDGWVKPGTLTALMGSSGA | 893 |
| | : :**::: : * ** : *.**. *****:*********:*** | |
| | Walker A | |
| ET306 | GKTTLLDVLANRVTMGIVIGNMFVNGRLRDSSFQRSTGYVQQQDLHLPTATVREALRFSA | 947 |
| ET304 | GKTTLLDVLANRVTMGVVTGDMFVNGHLRDNSFQRSTGYVQQQDLHLRTATVREALKFSA | 954 |
| ET299 | GKTTLLDCLASRVTMGVITGDMFVNGHLRDNSFPRSIGYCQQQDLHLATATVRESLRFSA | 958 |
| ET293 | GKTTLLDCLASRVTTGVVTGDMFVNGHLRDASFARSIGYCQQQDLHLQTATVRESLRFAA | 930 |
| ET289 | GKTTLLDCLASRVTTGVITGDMEINGFLRDSSFARSIGYCQQQDLHLETSTVRESLRFSA | 974 |
| ET287 | GKTTLLDCLASRVTTGVITGDMFINGFLRDASFARSIGYCQQQDLHLETATVRESLRFSA | 954 |
| ET291 | GKTTLLDCLASRVTTGTITGDMFINGFLRDASFARSIGYCQQQDLHLESATVRESLRFAA | 981 |
| ET290 | GKTTLLDCLASRVTTGTITGDMFINGFLRDASFARSIGYCQQQDLHLQTATVRESLRFSA | 965 |
| ET282 | GKTTLLDCLAERVTMGVITGDIFVNGKIRDESFPRSIGYCQQQDLHLKTATVRESLIFSA | 952 |
| PDR5 | GKTTLLDCLAERVTMGVITGDILVNGIPRDKSFPRSIGYCQQQDLHLKTATVRESLRFSA | 969 |
| ET265 | GKTTLLDCLAERVTMGVITGDVLVDGRPRDESFPRSIGYCQQQDLHLKTSTVRESLRFSA | 953 |
| | ******* **.*** * :**:::::* ** ** ** ** ******* ::****:* *:* | |
| ET306 | YLRQPAEVSKAEKDDYVEEVIKILDMQKYADAVVGVAGEGLNVEQRKRLTIGVELAAKPK | 1007 |
| ET304 | YLRQPASVSTAEKDQYVEEVISILDMEKYADAVVGVAGEGLNVEQRKRLTIGVELAAKPK | 1014 |
| ET299 | YLRQSSEVSIEEKNSYVEDVLRILEMEPYADAVVGIAGEGLNVEQRKRLTIGVELAAKPK | 1018 |
| ET293 | YLRQPASVSTEEKNDYVEEIIRILDMEKYADAVVGVAGEGLNVEQRKRLTIGVELSAKPK | 990 |
| ET289 | YLRQPSHISKQEKDRYVEEVIRILEMLPYADAVVGVAGEGLNVEQRKRLTIGVELAAKPK | 1034 |
| ET287 | YLRQPDHVSIQDKNSYVDDVIRILEMEKYADAVVGVAGEGLNVEQRKRLTIGVELAAKPK | 1014 |
| ET291 | YLRQPATVSEDEKNKYVEDVIKILEMETYANAVVGVAGEGLNVEQRKRLTIGVELAAKPK | 1041 |
| ET290 | YLRQPSSVSKSEKEKYVEDVIKILEMETYADAVVGVAGEGLNVEQRKRLTIGVELAAKPK | 1025 |
| ET282 | MLRQPKSVPVSEKKKYVDDVIRILEMEQYADAVVGVPGEGLNVEQRKRLTIGVELVAKPK | 1012 |
| PDR5 | YLRQPAEVSIEEKNRYVEEVIKILEMEKYADAVVGVAGEGLNVEQRKRLTIGVELTAKPK | 1029 |
| ET265 | YLRQPAEVSVEEKDAYVEEVIKILEMEKYADAVVGVAGEGLNVEQRKRLTIGVELAAKPK | 1013 |
| | *** : :*. **:::: **:* **:****: ****************** **** | |
| | S-region | |
| ET306 | LLLFFDEPTSGLDSQTAWSICQLMRKLANHGQAILCTIHQPSAILMQEFDRLLFLAKGGR | 1067 |
| ET304 | LLLFLDEPTSGLDSQTAWSICQLMRKLANHGQAILCTIHQPSAILMQEFDRLLFLARGGK | 1074 |
| ET299 | LLLFLDEPTSGLDSQTAWSICQLMRKLADHGQAILCTIHQPSALLMQEFDRLLFLQKGGK | 1078 |
| ET293 | LLLFLDEPTSGLDSQTAWAICQLMRKLANHGQAILCTIHQPSALLMQEFDRLLFLKRGGR | 1050 |
| ET289 | LLLFLDEPTSGLDSQTAWSICQLMRKLANHGQAILCTIHQPSALLMQEFDRLLFLQRGGK | 1094 |
| ET287 | LLLFLDEPTSGLDSQTAWSICQLMRKLANHGQAILCTIHQPSALLMQEFDRLLELQRGGR | 1074 |
| ET291 | LLLFLDEPTSGLDSQTAWSICQLMRKLANHGQAILCTIHQPSALLMQEFDRLLFLQRGGQ | 1101 |
| ET290 | LLLFLDEPTSGLDSQTAWSICQLMRKLANHGQAILCTIHQPSALLMQEFDRLLFLQRGGK | 1085 |
| ET282 | LLVFLDEPTSGLDSQTAWSICQLMKKLSKHGQAILCTIHQPSAMLMQEFDRLLFLQKGGN | 1072 |
| PDR5 | LLVFLDEPTSGLDSQTAWSICQLMKKLANHGQAILCTIHQPSAILMQEFDRLLFMQRGGK | 1089 |
| ET265 | LLVFLDEPTSGLDSQTAWSICQLMRKLASHGQAILCTIHQPSAILMQEFDRLLFLQKGGK | 1073 |
| | **:*:*************:*****:**:.**************:**********: :**. | |
| | Walker B | |
| ET306 | TVYFGDLGEGCQTLIDYFEKYGAPKCPPEANPAEWMLHVIGAAPGSHANQDYHQVWLDSA | 1127 |
| ET304 | TVYFGDLGKNCQTLIDYFEKYGAPKCPPEANPAEWMLHVIGAAPGSHANQDYYQVWLNST | 1134 |
| ET299 | TIYFGDLGPGCETMIDYFESHGADKCPEGANPAEWMLEVIGAAPGSHANQDYHEVWRNSE | 1138 |
| ET293 | TVYFGDLGDGCSKMIDYFESQGAPKCPPGANPAEWMLEVIGAAPGSHTDKDYGEVWRNSD | 1110 |
| ET289 | TVYFGDLGPGCQTMIDYFESHGAHKCPDGANPAEWMLEVIGAAPGTHASQNYHDVWRNSD | 1154 |
| ET287 | TVYFGELGAGCQTMIDYFESHGSHKCPSGANPAEWMLEVIGAAPGTHAAQDYNEVWRNSD | 1134 |
| ET291 | TVYFGELGKGCHKMIDYFESNGAPRCPDGANPAEWMLAVIGAAPGTHANQDYHEVWRNSP | 1161 |
| ET290 | TVYFGDLGKGCQTMIDYFEKNGAHPCPAGANPAEWMLEVIGAAPGSHANQNYSEVWRNSS | 1145 |
| ET282 | TVYFGDLGKDCKTMIDYFESNGADPCPPDANPAEWMLEVVGAAPGTHANRDYHEAWRNSP | 1132 |
| PDR5 | TVYFGDLGEGCKTMIDYFESHGAHKCPADANPAEWMLEVVGAAPGSHANQDYYEVWRNSE | 1149 |
| ET265 | TVYFGELGEGCQVMIDYFERNGSHKCPPDANPAEWMLEVVGAAPGSHANQDYHEVWRNSE | 1133 |
| | *:***:** .* :***** *: ** ******** *:*****:*: ::* :.* :* | |
| ET306 | ERRDVLSELDRMEKELVNIP-VDDSVSHSEFAAPFWVQLTVVTARVFQQFWRTPSYIWAK | 1186 |
| ET304 | ERQEVKQELDRMERELSQLP-RDDSIDHNEYAAPEWKQYGIVTQRVFQQYWRSPIYIYSK | 1193 |
| ET299 | EYNAVQQKLDWMEVELAKKP-LDNSSEQSEEGTSIFYQCKIVTLRLFQQYYRTPSYIWSK | 1197 |
| ET293 | EYRAVQEELDWMERELPKRP-LDTAAEQTEFATSLETQYKLVTQRLFQQYWRTPSYLWSK | 1169 |
| ET289 | EYRAVQEELEWMERELPKKP-IDTSNEQSEESTSLFYQYCLVTKRLLEQYWRTPSYLWSK | 1213 |
| ET287 | EYRAVQEELEWMERELPNRPAVDTSSEQSEFSTSLVYQYSLVTHRLLQQYWRTPSYLWSK | 1194 |
| ET291 | EYRAVQEELEWMEQELPKKP-IDTSNEQTEFAASLLYQYYLVTKRLAEQYWRTPSYLWSK | 1220 |
| ET290 | EYKAVQEELEWMEKELPKRP-EDNSSEQTEFATSLVYQYTLVTKRLVEQYWRTPSYLWSK | 1204 |
| ET282 | EYQAVQQELDRLENELQSLDEEDGVEKHKSEATDVFTQIKFVSFRLQQQYWRSPQYLWSK | 1192 |
| PDR5 | EYRAVQSELDWMERELPKKGSITAAEDKHEFSQSIIYQTKLVSIRLFQQYWRSPDYLWSK | 1209 |
| ET265 | EFRIVHEELDLMERELPAKSAG-VDTDHQEFATGLFYQTKLVSVRLFQQYWRSPEYLWAK | 1192 |
| | * . * .:*: :* ** .: .:. . * .*: *: :*::*:* *:::* | |
| ET306 | MFLSVVSSLFIGFIFFRSKNSIQGLQNQMFALFMFLTIFNPLLQQILPTFVSQRDLYETR | 1246 |
| ET304 | LFLAISSSMFIGFAFFKAKNTRQGLQNQMFALFMFLVIFNALIQQTLPEYVRQRELYEVR | 1253 |
| ET299 | LFLTIFSQLFIGFTFFKAKLDMQGLQNQLEAVFTFTVIFNPACQQYLPLFVSQRDLYEAR | 1257 |
| ET293 | IILTLISQIFIGFTFFKSDSTLQGLQNQMLSIFMFTVVFNPTLQQYLPSFVSQRDLYEAR | 1229 |
| ET289 | IGLTIISQIFIGFTFFKADSSMQGLQNQMLSIFMFTVIFNPTLQQYLPTFVSQRDLYEAR | 1273 |
| ET287 | VGLTIISQLFIGFTFFKSDSSMQGLQNQMLSIFMFAVIFNPTLQQYLPTFVSQRDLYEAR | 1254 |
| ET291 | LILSVISQIFIGFTFFKADSSLQGLQNQMLSIFMFTLVFNPTLQQYLPTFVSQRGLYEAR | 1280 |
| ET290 | IGLTIISQIFIGFTFFKADNSMQGLQNQMLSIFMFSVIFNPTLQQYLPTFVAQRDLYEAR | 1264 |
| ET282 | FFLTVISELFIGFTFFKADRSMQGLQNQMLAVFMFTVIFNAILEQYLPNYVEQRDLYEAR | 1252 |
| PDR5 | FILTIFNQLFIGFTFFKAGTSLQGLQNQMLAVFMFTVIFNPILQQYLPSFVQQRDLYEAR | 1269 |
| ET265 | FVLTIFNELFIGFTFFKAGTSLQGLQNQMLAAFMFTVIFNPLLQQYLPSFVQQRDLYEAR | 1252 |
| | . *:: ..:**** **:: ******::: * * :** :* ** :* ** ***.* | |
| ET306 | ERPAKTFSWKAFIIAQFIAEAPWNAFVGTVGFFCFYYPAGFYRNAEPY--DEVNGRGAYG | 1304 |
| ET304 | ERPSKTFSWKAFITAQITSEVPWNALVGTIAFLVFYYPVGFYNNAAPNGSAEVHDRGAYA | 1313 |
| ET299 | ERPSRTFSWLAFIYSQIVVEIPFNVVIGTIGFFVFYYPIGFYNNASYS--DQLNERGVLF | 1315 |
| ET293 | ERPSRTFSWKAFILSQITVEAPWNEAVGTLGFLIYYYPVSFYRNASYA--HQLHERGALF | 1287 |
| ET289 | ERPSRTFSWLAFILSQISVEIPWNILAGTVGFFVYYFPVGFYNNASFA--DQLHERGALF | 1331 |
| ET287 | ERPSRIFSWVAFILSQITVEIPWNIFAGTIGFLVYYYPVGFYSNASYA--GQLHERGALF | 1312 |
| ET291 | ERPSKTFSWVSEMLSQITVEIPWNILAGTIGFIIYYYPVGFYNNASKA--GQLHERGALF | 1338 |
| ET290 | ERPSRIFSWVAFILSQITVEIPWNIIAGTIGFLVYYYPVGLYSTASKA--GQLHERGALF | 1322 |
| ET282 | ERPSRTFSWFAFIVSQILVEAPWNFLAGTIAYFIYYYPIGFYQNASAA--GQLHERGALF | 1310 |
| PDR5 | ERPSRTFSWISFIFAQIFVEVPWNILAGTIAYFIYYYPIGFYSNASAA--GQLHERGALF | 1327 |
| ET265 | ERPSRTFSWKAFIVSQILVEAPWNFLAGTLAYFIYYYPIGFYENASYA--GQLHERGALF | 1310 |
| | ***::**** :*: :*: * *:* **:.:: :*:* .:* .* ::: **. | |
| ET306 | WFFAVLFFIYIGSMAHMLIAPLQIADSAGNLGSLLFTMCLTFCGVLVTKDALPGFWVFMY | 1364 |
| ET304 | WFLTVLFFVYTGSFAHLVIAPLELADAAGNLASLIFTLCLTFCGVLVTSEGLPGFWIFMY | 1373 |
| ET299 | WLFSVAFYVFISSMGQLCIAGLEYAEAAGNLASLCFTMSLNFCGVEGGPGVLPGFWVFMY | 1375 |
| ET293 | WLFCTAFYVYVGSMGQLCIAGIEVAESAGHIASLMFTLSLSFCGVMVTPQNMPGFWKFMY | 1347 |
| ET289 | WLYATAFYVFTGSMAQLVIASQEVAQSAGQISSLLFTMCLSFCGVMVQPNNMPRFWIFMY | 1391 |
| ET287 | WLYATAFYVETGSMAQLVVAGQEVAQAAGQIASLLFTLSLSFCGVMVQPYNMPGFWIFMY | 1372 |
| ET291 | WLYCTAFYVETGSMAQVCIAGLDVAEAAGELGSLLYTLALSFCGVMVTPSNMPRFWLFMY | 1398 |
| ET290 | WLYATAYYVFTGSMAQLCIAGQEVAEPAGQMASLLFTLSLSFCGVLVGPSSMPGFWKFMY | 1382 |
| ET282 | FLWSTAFYVWVGSMALLANSFIEHDVSAANLANLCFTLALSFCGVMTTPDAMPHFWIFMY | 1370 |
| PDR5 | WLFSCAFYVYVGSMGLIVISFNQVAESAANLASLLFTMSLSFCGVMITPSAMPRFWIFMY | 1387 |
| ET265 | WLFSTAFYVYVGSMGELTVSFNEIAENAANLASLMFTMALSFCGVMTTPSAMPRFWIFMY | 1370 |
| | :: :::: .*:. : : : *..:..* :*:.*.****: :* ** *** | |
| ET306 | RVSPETYFIEGYLINALAHNKIVCSEEEFRVLSPPDGLTCQDYLGDYISKAGTGYLQDPE | 1424 |
| ET304 | RVSPETYFIDGELSNAVAHNVVKCSDSELVHFSPPQGATCGDYMKEYLEKAGTGYVEDPS | 1433 |
| ET299 | RVSPLSYFIDGVLSTALANNPVTCADYEYLSFVPKSGETCGEYMSTYIATYG-GYILDPD | 1434 |
| ET293 | RASPLTYFIDGLMSTGLANAPAHCSHYELVSFTPPAGQTCGEYMAPYIKMAGTGYLTSPS | 1407 |
| ET289 | RVSPLTYFIDGTLSTGLANADVHCSDYEMVSFTPPQGQTCGQYMQSYISSAGTGYLADPD | 1451 |
| ET287 | RVSPLTYFIDGALSTGIANAKVHCADYEMVRFTPPQGQTCGQYMQPYITAAGTGYLKDSG | 1432 |
| ET291 | RVSPITYFIDGVLSTGVANADVHCADYEMVRFTPPAGQTCGQYMSRYIETTGTGYLDDPS | 1458 |
| ET290 | RVSPLTYFVDGTLSTGIANGKVQCSDYELVKFKPANGMTCGEYMEPYIKLVGTGYLSDPS | 1442 |
| ET282 | RVSPLTYFIDAVLAVGIANVDIECSNYEFVQFTPPQGRTCGEYMQAYLKSAGTGYLKDAN | 1430 |
| PDR5 | RVSPLTYFIQALLAVGVANVDVKCADYELLEFTPPSGMTCGQYMEPYLQLAKTGYLTDEN | 1447 |
| ET265 | RVSPLTYFVQGILAVGLANTKIECSSSEFLQFEAPSGMTCGNYMEAYLDYAGTGYLKDES | 1430 |
| | *.**::**::. :: .:*: *: * : * ** :*: *: **: . | |
| ET306 | ATGSCQFCPMSKTDDFLAQVQLDYGNRWRDVGIFIAFIFINLFFAVLFYWLARVPKKSDR | 1484 |
| ET304 | STSECGFCSISSTDAFLKVVKLDYGRRWRNVGIFIAFIVINWILAVFFYWLARVPKKNDR | 1493 |
| ET299 | ATDECSFCRISSTNAFLSSFQSSYHRRWRNEGIFIVFIVENWAGCIFFYWLARVPKKNNR | 1494 |
| ET293 | ATDKCSFCPVSTTNDYLAQVSSHYKDRWRNWGIFICYIFIDFGFAIFFYWLARVPKKKNR | 1467 |
| ET289 | ATDECRFCSVSSTNDYLKAVSSEYTHRWRNYGIFLAFIMFNFAAAVFFYWLARVPKKRNR | 1511 |
| ET287 | ATDECQFCSVSTTNDYLKAVSSSYSHRWRNYGIFLAFIMFNFAAAVFFYWLARVPKKRNR | 1492 |
| ET291 | AMDECKFCSVSDTNEFLKAVISSYDHRWRNYGIFLVFIFVNFALASFLYWLMRVPKKRNR | 1518 |
| ET290 | ATDECRFCSVSTTNDYLSAVSSSYSRRWRNYGIFLVYIFFNFAMAVFIYWLARVPKKRNR | 1502 |
| ET282 | ATAQCLLCPLSRTNDYLSQVNSHYSHRWRNYGIFICYIVFNYVAAVFLYWLARVPKKDTF | 1490 |
| PDR5 | ATDTCSFCQISTTNDYLANVNSFYSERWRNYGIFICYIAFNYIAGVFFYWLARVPKKNGK | 1507 |
| ET265 | ATGTCEFCEYSYTNDYLSSINSYYSQRWRNWGIFICYIAINYIGGIAFYYLARVPKKSKV | 1490 |
| | : * :* * *: :* . * ***: ***: :* .: :*:* ***** | |
| ET306 | VSTEQPEGAVNMGAELEKKAALHRT-ATNAASQAASQGYAPQVYNEKVGSEEGSLDKVDN | 1543 |
| ET304 | VKSGAEAESTNKTVQKQETASIIEKEESSSNSKA-------------------------- | 1527 |
| ET299 | VANERNPDRETTKQISTHGE-------KS-KPQQIE-----QV----------------- | 1524 |
| ET293 | VADERDPDAPKKSVAGTKN----------------------------------------- | 1486 |
| ET289 | VADERKPEAQKIQEK--------------------------------------------- | 1526 |
| ET287 | VADERKSDAQKLKEK--------------------------------------------- | 1507 |
| ET291 | VVDERKPEAQKLASK--------------------------------------------- | 1533 |
| ET290 | VADERKTEAQKLVEK--------------------------------------------- | 1517 |
| ET282 | FSKIESKK---------------------------------------------------- | 1498 |
| PDR5 | LSKK-------------------------------------------------------- | 1511 |
| ET265 | AKK--------------------------------------------------------- | 1493 |
| ET306 | SDSSR | 1548 |
| ET304 | ----- | 1527 |
| ET299 | ----- | 1524 |
| ET293 | ----- | 1486 |
| ET289 | ----- | 1526 |
| ET287 | ----- | 1507 |
| ET291 | ----- | 1533 |
| ET290 | ----- | 1517 |
| ET282 | ----- | 1498 |
| PDR5 | ----- | 1511 |
| ET265 | ----- | 1493 |

[0477] As can be seen by the consensus shown with asterisks, there is a high degree of conservation in certain regions of the PDR5 homologs that show activity for exporting nororipavine products. Studies of the Saccharomyces cerevisiae PDR5 have predicted the structure of the transmembrane protein and identified areas important for activity and binding (E. Balzi et al, JBC Vol. 269, pp 2206-2214, 1994). These residues are shown in bold in Table 10. The consensus region of PDR5 and its homologs are predicted as follows: Walker A sequences corresponding to amino acid residues of S. cerevisiae PDR5 are 193-200 GRPGSGC(S/T), and residues 905-912 G(A/S)SGAGKT. The Walker B conserved regions are (F/L)QCWD at residues 329-333 of S. cerevisiae PDR5 and 1030-1035 LL(V/L)F(L/F)D. The ABC transporter signature(S) in PDR5 and its homologs is VSGGERKRVSIA at 309-320 and LNVEQRKRLTIG at residues 1010-1021.

### Example 9 Effect of ABC Transporters on Oripavine Production from Thebaine

[0478] The effect of a subset of the ABC transporters from previous examples was tested in bioconversion reactions where an O-demethylase was used to convert thebaine to oripavine.

[0479] sOD1133 is a Saccharomyces cerevisiae yeast strain comprising recombinant polynucleotide sequences expressing a P450 O-demethylase (modified version of SEQ ID NO: 236), CPR (SEQ ID NO: 305, encoded by SEQ ID NO: 306) and an uptake transporter (SEQ ID NO: 623, encoded by SEQ ID NO: 624), which enable it to import and convert thebaine to oripavine. The background of S. cerevisiae sOD1133 is similar to the commonly available strain S288C (genotype MATa his340 leu2A0 ura3A0) (see the Saccharomyces Genome Database (SGD)). Different putative efflux transporters were overexpressed in sOD1133 using plasmid RPB15. An empty RPB15 control plasmid is the negative control for the data in this example. RPB15 is a derivative of vector p416TEF (Mumberg, 1995). One of skill in the art will know that other uptake transporters, O-demethylases, or CPRs may be used to achieve similar results. For example, T193_AanPUP3_55 (SEQ ID NO: 613), T198_AcoT97_GA (SEQ ID NO: 623), T149_AcoPUP3_59 (SEQ ID NO: 537) and/or T122_PsoPUP3_17 (SEQ ID NO: 487) have shown particularly effective for thebaine uptake. Further suitable transporter proteins are disclosed in WO2020/078837. Suitable demethylase enzymes (and accompanying CPRs) for conversion of thebaine to oripavine or northebaine to nororipavine include but are not limited to: SEQ ID Nos. 222, 224 and 236 when individually expressed in a yeast strain that contains demethylase-CPR Ce_CPR as described in WO 2021/069714 A1, and SEQ ID Nos. 198 and 874 or variants thereof, or additional enzymes that have both N- and O-demethylase activity such as those described in paragraphs 0124-0127 of WO 2021/069714 A1.

[0480] All experiments were run in triplicates. At first the strains were grown aerobically as 96-deep well cultures at 30° C. for 24 h in Delft media pH 5.5. This pre-culturing was followed by 10× dilution of the cultures with fresh Delft media pH 5.5 including the addition of 1 mM thebaine. Again, strains were grown aerobically as a 96-deep well culture at 30° C. After 72 hours total broth samples were prepared. For the total broth samples an aliquot of the total cell culture was taken and mixed 1:1 with 0.2% formic acid in water and heated to 80° C. for 10 minutes. After heating cells were pelleted by centrifugation and supernatants were diluted 1:1 in 0.1% formic acid in water and analyzed. Opioids were quantified as described in Example 1. Analysis of thebaine/oripavine samples was performed as described in Example 1, with separation achieved on a Kinetex F5 column (100×2.1 mm, 1.7 μm, 100 Å, Phenomenex, Torrance, CA, USA) using 0.05% (v/v) formic acid in H₂O and 0.05% (v/v) formic acid in acetonitrile as mobile phases A and B, respectively using the time-gradient as shown in Table 11.

TABLE 11

| Time [min] | B % |
|---|---|
| 0.0-1.0 | 2% |
| 1.0-5.2 | 2-33% |
| 5.2-5.5 | 33-100% |
| 5.5-6.5 | 100% |
| 6.5-6.7 | 100-2% |
| 6.7-7 | 2% |

1.5 min postrun

[0481] The injection volume was 1 μL and the flow rate was 600 L/min. The column temperature was maintained at 30° C. The liquid chromatography system was coupled to an Agilent 1290 diode array detector (Agilent Technologies, Palo Alto, CA, USA). UV-spectra were acquired at 220, 254 and 285 nm.

[0482] Co-expression of efflux transporters ET72 and ET319 increased the total conversion of thebaine to oripavine in sOD1133 as compared to no expression of heterologous exporters. Without being bound by theory, these transporters transport oripavine out of the cells, thus resulting in higher oripavine production by creating a product sink of end material out of the yeast cytosol.

[0483] Several transporters had activity that was similar to the negative control (empty plasmid), meaning no activity for oripavine transport. However, transporters ET196, ET202, ET282, ET304, ET306, ET316 and ET321 actually reduced the production of oripavine as shown in FIG. 8b. These transporters must transport the substrate thebaine out of cells thus resulting in a lower yield due to less thebaine available for bioconversion as well as a futile cycle of import/export of thebaine.

[0484] While thebaine excretion is disadvantageous in the conversion of thebaine to oripavine, it is expected that these transporters would improve production of thebaine in strains where thebaine is the end product, i.e. in strains producing thebaine e.g. from glucose or tyrosine derivatives such as those described by Han, J., Wu, Y., Zhou, Y. et al. (Engineering Saccharomyces cerevisiae to produce plant benzylisoquinoline alkaloids. aBIOTECH 2, 264-275 (2021). https://doi.org/10.1007/s42994-021-00055-0). It has been shown previously that efflux of end product molecules from genetically engineered strains improves their production (Z. M. Belew, M. Poborsky, H. H. Nour-Eldin, B. A. Halkier, Transport engineering in microbial cell factories producing plant specialized metabolites, Current Opinion in Green and Sustainable Chemistry, https://doi.org/10.1016/j.cogsc.2021.100576).)

### REFERENCES

[0485] Bateman et al., Nucl. Acids Res., 27:260-262 (1999).
[0486] Bitter B G A, Egan K M, Koski R A, Jones M O, Elliott S G, Giffin J C. Expression and secretion vectors for yeast. Methods Enzymol. 153:516-44. pmid: 2828848 (1987)
[0487] Boswell-Casteel, Rebba C; Franklin A; Hays; Equilibrative Nucleoside Transporters-A Review; Nucleosides Nucleotides Nucleic Acids; 2017 Jan. 2; 36 (1): 7-30.
[0488] Brohée et al. (“YTPdb: A wiki database of yeast membrane transporters”; Biochimica et Biophysica Acta 1798 (2010) 1908-1912)
[0489] Carroll, R. J. et al, J. Org. Chem. 2009, 74, 2, 747-752 Dec. 11, 2008;
[0490] Dastmalchi et al. (“Purine permease-type benzylisquinoline alkaloid transporters in opium poppy”; Plant Physiology Preview. DOI: 10.1104/pp. 19.00565 (2019))
[0491] Dasgupta, A., Chapter 2—Prescription Opioids: An Overview, Editor(s): Amitava Dasgupta, Fighting the Opioid Epidemic, Elsevier, 2020, Pages 17-41
[0492] Dias P J, et al. (2010) Evolution of the 12-spanner drug: H+ antiporter DHA1 family in hemi-ascomycetous yeasts. OMICS 14 (6): 701-10
[0493] Fossati, E. et al. Synthesis of Morphinan Alkaloids in Saccharomyces cerevisiae. PLOS One. 2015 Apr. 23; 10 (4): e0124459.→Codeine and morphine from thebaine
[0494] Galanie et al. (“Complete biosynthesis of opioids in yeast”; Science. 2015 Sep. 4; 349 (6252): 1095-1100)
[0495] Hansen B. G. et al (2011); Versatile enzyme expression and characterization system for Aspergillus nidulans, with the Penicillium brevicompactum polyketide synthase gene from the mycophenolic acid gene cluster as a test case; App. and Environmental Microbiology; 77 (9): 3044-3051.
[0496] Hudlicky, T., 2015; Recent advances in process development for opiate-derived pharmaceutical agents; Canadian Journal of Chemistry. 93 (5): 492-501.
[0497] Jørgensen et al. (“Origin and evolution of transporter substrate specificity within the NPF family”; eLife 2017; 6: e19466. DOI: 10.7554/eLife.19466)
[0498] Jørgensen et al. (“A Functional EXXEK Motif is Essential for Proton Coupling and Active Glu-cosinolate Transport by NPF2.11”; Plant Cell Physiol. 56 (12): 2340-2350 (2015))
[0499] Katzmann, D J, T C Hallstrom, M Voet, W. Wysock, J. Golin, J. Volckaert, and W. S. Moye-Rowley. 1995. Expression of an ATP-Binding Cassette Transporter-Encoding Gene (YOR1) Is Required for Oligomycin Resistance in Saccharomyces cerevisiae. MOLECULAR AND CELLULAR BIOLOGY, December: 6875-6883
[0500] Kawahara T, et al.; 1997; Endoplasmic reticulum stress-induced mRNA splicing permits synthesis of transcription factor Hac1p/Ern4p that activates the unfolded protein response; Molecular Biology Cell; 8 (10): 1845-1862
[0501] Krainer, F. W., et al.; 2015; Optimizing cofactor availability for the production of recombinant heme peroxidase in Pichia pastoris; Microbial cell factories; 14, 4.
[0502] Krishnamurthy P, Xie T, Schuetz J D.; 2007; The role of transporters in cellular heme and porphyrin homeostasis; Pharmacol Ther.; 114, 345-358.
[0503] Maury J, et al. EasyCloneMulti: A Set of Vectors for Simultaneous and Multiple Genomic Integrations in Saccharomyces cerevisiae. PLOS One 11 (3): e0150394 (2016)
[0504] Michener, J. K., et al.; 2012; Identification and treatment of heme depletion attributed to overexpression of a lineage of evolved P450 monooxygenases. Proceedings of the National Academy of Sciences. 109; 19504-19509.
[0505] Mikkelsen et al.; Microbial production of indolylglucosinolate through engineering of a multi-gene pathway in a versatile yeast expression platform; Metabolic Engineering; Volume 14; Issue 2; Pages 104-111; March 2012.
[0506] Mumberg D, Müller R, Funk M.; Yeast Vectors for the Controlled Expression of Heterologous Proteins in Different Genetic Backgrounds; Gene; 156; 1995.
[0507] Narcross L, Fossati E, Bourgeois L, Dueber J E, Martin V J J. Microbial Factories for the Production of Benzylisoquinoline Alkaloids. Trends Biotechnol. 2016 March; 34 (3): 228-241.
[0508] Nielsen, J. B., M. L. Nielsen, and U. H. Mortensen; (2008); Transient disruption of nonhomologous end-joining facilitates targeted genome manipulation in the filamentous fungus Aspergillus nidulans; Fungal Genet. Biol.; 45:165-170.
[0509] Nour-Eldin H. H., Hansen B. G., Nørholm M. H., Jensen J. K., Halkier B. A. (2006); Advancing uracil-excision based cloning towards an ideal technique for cloning PCR fragments; Nucleic Acids Res; 34: e122.
[0510] Osmani et al., 2009, Phytochemistry 70:325-347
[0511] Protchenko, O., and C. C. Philpott; 2003; Regulation of intracellular heme levels by HMX1, a homologue of heme oxygenase, in Saccharomyces cerevisiae; J. Biol. Chem.; 278:36582-36587.
[0512] Pyne M E, Kevvai K, Grewal P S, Narcross L, Choi B, Bourgeois L, Dueber J E, & Martin V J J; A yeast platform for high-level synthesis of natural and unnatural tetrahydroisoquinoline alkaloids; BioRxiv preprint doi: https://doi.org/10.1101/863506, posted Dec. 5, 2019.
[0513] Ramanathan, V. S. and Chandra, P; Bulletin on Narcotics-1980, Issue 2.
[0514] Santella, M., 2021; Preparation Of Buprenorphine; WO/2021/144362
[0515] Sipos et al. (“First Synthesis and Utilization of Oripavidine—a concise and Efficient Route to Important Morphinans and Apomorphines”; Helvetica Chimica Acta. Vol. 92:1359-1365 (2009))
[0516] Sonnhammer et al., Nucl. Acids Res., 26:320-322 (1998).
[0517] Sonnhammer et al., Proteins, 28:405-420 (1997).
[0518] Stincone A, et al.; 2015; The return of metabolism: biochemistry and physiology of the pentose phosphate pathway; Biol Rev Camb Philos Soc.; August; 90 (3): 927-963.
[0519] Thorton, John D; Science and practice of liquid-liquid extraction Oxford: Clarendon Press, 1992-Chapter by Michael S. Verrall
[0520] Tolkachev, O. N., Shemeryankin, B. V. & Pronina, N. V. Isolation and purification of alkaloids. Chem Nat Compd 19, 387-400 (1983).
[0521] Van Wiltenburg, J., Santella, M., Roussel, P.; 2018; Preparation Of Buprenorphine; WO/2018/211331
[0522] Walker, J. E., M. Saraste, M. J. Runswick, and N. Gay. 1982. Distantly related sequences in the alpha and beta subunits of ATP synthase, myosin, kinases and other ATP-requiring enzymes and a common nucleotide binding fold. EMBO J. 8:945-951.
[0523] Yu X W, et al.; 2017; Identification of novel factors enhancing recombinant protein production in multi-copy Komagataella phaffii based on transcriptomic analysis of overexpression effects; Sci. Rep. November; 24; 7 (1): 16249

### ITEMS OF THE INVENTION

[0524] Having described the invention in detail and by reference to specific embodiments thereof, it will be apparent that modifications and variations are possible without departing from the scope of the invention defined in the appended claims. More specifically, although some aspects of the present invention are identified herein as particularly advantageous, it is contemplated that the present invention is not necessarily limited to these particular aspects of the invention. In some aspects, the present invention may be presented in the following itemized embodiments.

[0525] Item 1. A recombinant microbial host cell capable of producing one or more BIA, BIA-glycoside, oripavine or glycosylated oripavine or glucosylated oripavine, thebaine, northebaine, nororipavine or glycosylated nororipavine or glucosylated nororipavine, wherein the host cell comprises a recombinant polynucleotide comprising a promoter operably linked to an ABC transporter effluxing one or more BIA or BIA-glycoside products.

[0526] Item 2. The recombinant microbial host cell of item 1, wherein one or more of the ABC transporters are one or more selected from:
[0527] a. present in the host cell at a gene copy number greater than in the wild type of the microbial host cell,
[0528] b. operably linked to a constitutive promoter or an inducible promoter that induces expression during cell exponential phase and BIA production, or
[0529] c. are under regulatory control such that a higher level of gene expression is induced by growth medium, growth conditions, the presence of an activator or transcription factor or absence of a repressor for an inducible promoter governing expression of the one or more endogenous ABC transporters, or any combination thereof.

[0530] Item 3. The recombinant microbial host cell of item 1 or 2, wherein the increased expression of one or more endogenous ABC transporters results from elevated levels of one or more transcription factors, wherein the one or more transcription factors are selected from:
[0531] a. polypeptide sequence having at least 75%, such as at least 80%, such as at least 85%, such as at least 90%, such as at least 95%, such as at least 99%, or 100% identity to SEQ ID No. 902, 904, 906, 908, or
[0532] b. encoded by a nucleic acid sequence having at least 75%, such as at least 80%, such as at least 85%, such as at least 90%, such as at least 95%, such as at least 99%, or 100% identity to SEQ ID No. 901, 903, 905, 907, or genomic DNA thereof.

[0533] Item 4. The recombinant microbial host cell of any preceding item, wherein the transcription factor is PDR 1, PDR3, PDR8 and/or YRR1.

[0534] Item 5. A recombinant microbial host cell according to any preceding item, wherein the recombinant microbial host cell excretes the BIA, BIA-glycoside, oripavine, glycosylated oripavine or glucosylated oripavine, thebaine, northebaine, nororipavine, glycosylated nororipavine or glucosylated nororipavine produced by the recombinant microbial host cell, at greater than 2%, preferably greater than 5%, preferably greater than 10%, preferably greater than 20% more excretion compared to a negative control recombinant microbial host cell not expressing the ABC transporter during cell exponential phase and BIA production.

[0535] Item 6. A recombinant microbial host cell according to any preceding item, wherein the recombinant microbial host cell produces the one or more of the BIAs at greater than 2%, preferably more than 5%, preferably more than 10%, preferably more than 20%, preferably more than 50% more than a negative control recombinant microbial host cell not expressing the ABC transporter during cell exponential phase and BIA production comprising no heterologous ABC transporter effluxing the one or more BIA or BIA-glycoside products.

[0536] Item 7. A recombinant microbial host cell according to any preceding item, wherein the one or more excreted BIAs are thebaine, nororipavine, oripavine, glucosylated oripavine or glucosylated nororipavine.

[0537] Item 8. The recombinant microbial host cell of any preceding item, wherein the ABC transporter is an ABC transporter involved in drug efflux or xenobiotic efflux.

[0538] Item 9. The recombinant microbial host cell of any preceding item, wherein the ABC transporter comprises a Walker A sequence G(A/S/R)(S/T)GAGK(S/T), a linker sequence (L/V)SGG(E/Q), and a Walker B sequence comprising four hydrophobic residues, an optional additional fifth hydrophobic residue and a D such that (I/L)(I/L)(I/V/L)(F/L/M)XD where X represents the optional additional hydrophobic residue or no additional residue.

[0539] Item 10. The recombinant microbial host cell of any preceding item, wherein the ABC transporter is:
[0540] a. an ABCC/multi-drug resistance associated protein (MRP) ABC transporters, or
[0541] b. an ABCG/pleiotropic drug resistance (PDR) ABC transporters.

[0542] Item 11. The recombinant microbial host cell of any preceding item, wherein the ABC transporter is not native to a BIA-producing plant.

[0543] Item 12. The recombinant microbial host cell of any preceding item, wherein the ABCC/multi-drug resistance associated protein (MRP) ABC transporter is:
[0544] a. a polypeptide comprising a sequence having at least 45%, such as at least 60%, such as at least 70%, such as at least 80%, such as at least 85%, such as at least 90%, such as at least 95%, such as at least 99%, such as 100% identity to SEQ ID No. 872, 910, 912, 914, 918, 920, 922, 924, 926, 928, 930, 932, 934, 936, 938, 940, 942, 956, 960, 962, 964, 966, 970, 1032, 1034, 1038 or 1040 or
[0545] b. encoded by a nucleic acid sequence having at least 45%, such as at least 60%, such as at least 70%, such as at least 80%, such as at least 85%, such as at least 90%, such as at least 95%, such as at least 99%, such as 100% identity to SEQ ID No. 871, 909, 911, 913, 917, 919, 921, 923, 925, 927, 929, 931, 933, 935, 937, 939, 941, 955, 959, 961, 963, 965, 969, 1031, 1033, 1037 or 1039 or genomic DNA thereof.

[0546] Item 13. The recombinant microbial host cell of any of items 1 to 12, wherein the ABC transporter comprises Walker A sequences G(X)(I/V)G(S/T)GK where X is a residue selected from P, L, S, A, V or M and GRTGAGK, two linker sequences comprising LSGGQ and NFSLGE, and Walker B sequences (I/V/T)(I/Y/V)L(M/F/L)D and I(I/L)(I/V)(L/M)D.

[0547] Item 14. The recombinant microbial host cell of any of items 1 to 11, wherein the ABCG/pleiotropic drug resistance (PDR) ABC transporter is:
[0548] a. a polypeptide comprising a sequence having at least 45%, such as at least 60%, such as at least 75%, such as at least 80%, such as at least 85%, such as at least 90%, such as at least 95%, such as at least 99%, such as 100% identity to SEQ ID No. 916, 976, 980, 986, 988, 990, 994, 996, 1010, 1012, 1018, 1020, 1022, 1026, 1028 or 1030, or
[0549] b. encoded by a nucleic acid sequence having at least 70%, such as at least 80%, such as at least 85%, such as at least 90%, such as at least 95%, such as at least 99%, such as 100% identity to SEQ ID No. 915, 975, 979, 985, 987, 989, 993, 995, 1009, 1011, 1017, 1019, 1021, 1025, 1027 or 1029 or genomic DNA thereof.

[0550] Item 15. The recombinant microbial host cell of any of items 1 to 11 or item 14, wherein the ABC transporter comprises Walker A sequences GRPGSGC(S/T) and G(A/S)SGAGKT, linker sequences VSGGERKRVSIA and LNVEQRKRLTIG, and Walker B sequences (F/L)QCWD and LL(V/L)F(L/F)D.

[0551] Item 16. The recombinant microbial host cell of any preceding item, further comprising:
[0552] a) one or more heterologous CYP demethylases capable of converting thebaine into northebaine, thebaine into oripavine, northebaine into nororipavine and/or oripavine into nororipavine, and one or more demethylase cytochrome P450 reductase (demethylase-CPR), and/or
[0553] b) heterologous sequences encoding:
   [0554] i. a tyrosine hydroxylase (TH) converting L-tyrosine into L-dopa, and
   [0555] ii. optionally, a TH-CPR capable of reducing the TH of i), and
   [0556] iii. a L-dopa decarboxylase (DODC) converting L-dopa into dopamine, or a tyrosine decarboxylase (TYDC) converting L-dopa into dopamine, and
   [0557] iv. a monoamine oxidase converting dopamine into 3,4-DHPAA, or a N-methyl-coclaurine hydroxylase (NMCH) converting (S)-Coclaurine into (S)-3′-hydroxycoclaurine and/or (S)—N-Methylcoclaurine into (S)-3′-Hydroxy-N-Methylcoclaurine; and
   [0558] v. a norcoclaurine synthase (NCS) converting Dopamine and 4-HPAA into (S)-norcoclaurine and/or 3,4-DHPAA and dopamine to NLDS, and
   [0559] vi. a 6-O-methyltransferase (6-OMT) converting (S)-norcoclaurine into (S)-Coclaurine and/or norlaudanosoline into (S)-3′-Hydroxy-coclaurine, and
   [0560] vii. a coclaurine-N-methyltransferase (CNMT) converting (S)-Coclaurine into (S)—N-Methylcoclaurine and/or (S)-3′-hydroxycoclaurine into (S)-3′-hydroxy-N-methyl-coclaurine, and
   [0561] viii. a 3′-hydroxy-N-methyl-(S)-coclaurine 4′-O-methyltransferase (4′-OMT) converting (S)-3′-Hydroxy-N-Methylcoclaurine into (S)-reticuline, and
   [0562] ix. a 1,2-dehydroreticuline synthase-1,2-dehydroreticuline reductase (DRS-DRR) converting (S)-reticuline into (R)-reticuline comprised of one or more proteins, and
   [0563] x. a salutaridine synthase (SAS) converting (R)-reticuline into Salutaridine, and
   [0564] xi. a salutaridine reductase (SAR) converting Salutaridine to Salutaridinol, and
   [0565] xii. a salutaridinol 7-O-acetyltransferase (SAT) converting Salutaridinol into 7-O-acetylsalutaridinol, and
   [0566] xiii. a thebaine synthase (THS) converting 7-O-acetylsalutaridinol or 7-O-acetylsalutaridinol acetate into thebaine;
[0567] c) and optionally, one or more glycosyl transferases capable of transferring a glycosyl moiety to a BIA, oripavine or nororipavine.

[0568] Item 17. The recombinant microbial host cell of item 16, wherein the one or more demethylases is:
[0569] a. an N-demethylase comprising a polypeptide sequence having at least 75%, such as at least 85%, such as at least 90% or at least 95% identity to SEQ ID No. 140, 152, 198, 250, 252, 843, or
[0570] b. an N-demethylase encoded by a nucleic acid sequence having at least 75%, such as at least 85%, such as at least 90% or at least 95% identity to 141, 153, 199, 251, 253, 844, or genomic DNA thereof, or
[0571] c. an O-demethylase comprising a polypeptide sequence having at least 75%, such as at least 85%, such as at least 90% or at least 95% identity to SEQ ID No. 198, 222, 224, 236, or
[0572] d. an O-demethylase encoded by a nucleic acid sequence having at least 75%, such as at least 85%, such as at least 90% or at least 95% identity to SEQ ID No. 199, 223, 225, or 237, or genomic DNA thereof.

[0573] Item 18. The recombinant microbial host cell of item 16 or 17, wherein the one or more CPRs:
[0574] a. comprises a polypeptide sequence having 75%, such as at least 85%, such as at least 90% or at least 95% identity to SEQ ID No. 292 or 305, or
[0575] b. is encoded by a nucleic acid sequence having at least 75%, such as at least 85%, such as at least 90% or at least 95% identity to SEQ ID No. 293 or 306, or genomic DNA thereof.

[0576] Item 19. The recombinant microbial host cell of any preceding item, wherein the one or more glycosyltransferases (UGT) is an aglycone O-UGT or an aglycone O-glucosyltransferase.

[0577] Item 20. The recombinant microbial host cell of any preceding item, wherein the one or more glycosyltransferases (UGT):
[0578] a. comprises an amino acid sequence having at least 60%, such as at least 70%, such at least 75%, such as at least 80%, such as at least 90%, such as at least 95%, such as at least 99%, such as 100% identity to a UGT comprised in any one of SEQ ID NO: 880, 882, 878, 884, 886, 888, 890, 892, 894, 896, or 898; or
[0579] b. is encoded by a nucleic acid sequence having at least 60%, such as at least 70%, such at least 75%, such as at least 80%, such as at least 90%, such as at least 95%, such as at least 99%, such as 100% identity to SEQ ID No. 879, 881, 877, 883, 885, 887, 889, 891, 893, 895 or 897, or genomic DNA thereof.

[0580] Item 21. The recombinant microbial host cell of any preceding item, wherein the recombinant microbial host cell is a yeast.

[0581] Item 22. The recombinant microbial host cell of any preceding item, wherein the recombinant microbial host cell is Saccharomyces cerevisiae.

[0582] Item 23. The recombinant microbial host cell of any preceding item, further comprising an uptake transporter capable of transporting an opioid, such as oripavine, into the recombinant host cell.

[0583] Item 24. The recombinant microbial host cell of item 23, wherein the uptake transporter is a polypeptide:
[0584] a. comprising an amino acid sequence having at least 60%, such as at least 70%, such at least 75%, such as at least 80%, such as at least 90%, such as at least 95%, such as at least 99%, such as 100% identity to an uptake transporter comprised in any one of SEQ ID NO: 307, 311, 317, 461, 473, 733, or 735.
[0585] b. encoded by a nucleic acid sequence comprising at least 60%, such as at least 70%, such at least 75%, such as at least 80%, such as at least 90%, such as at least 95%, such as at least 99%, such as 100% identity to 308, 312, 318, 462, 474, 734, 736, or genomic DNA thereof.

[0586] Item 25. The recombinant microbial host cell of any preceding item, further comprising an operative biosynthetic pathway capable of producing the thebaine, northebaine, oripavine and/or nororipavine, wherein the pathway comprises one or more polypeptides selected from:
[0587] a) a 3-deoxy-D-arabino-2-heptulosonic acid 7-phosphate synthase (DAHP synthase) converting PEP and E4P into DAHP;
[0588] b) a 5-enolpyruvylshikimate-3-phosphate (EPSP) synthase (aro1) converting 3-phosphoshikimate and PEP into EPSP;
[0589] c) an aro1 polypeptide converting DHAP and PEP into EPSP;
[0590] d) a 276horismite synthase converting EPSP into Chorismate;
[0591] e) a 276horismite mutase converting Chorismate into prephenate;
[0592] f) a prephenate dehydrogenase (Tyr1) converting prephenate into 4-HPP;
[0593] g) an aromatic aminotransferase converting 4-HPP into L-Tyrosine;
[0594] h) a tyrosine hydroxylase (TH) converting L-tyrosine into L-dopa
[0595] i) a TH-CPR capable of reducing the TH of h);
[0596] j) a L-dopa decarboxylase (DODC) converting L-dopa into dopamine;
[0597] k) a Tyrosine decarboxylase (TYDC) converting L-dopa into dopamine;
[0598] l) a hydroxyphenylpyruvate decarboxylase (HPPDC) converting 4-HPP into 4-HPPA;
[0599] m) a monoamine oxidase converting dopamine into 3,4-DHPAA;
[0600] n) a norcoclaurine synthase (NCS) converting Dopamine and 4-HPAA into (S)-norcoclaurine;
[0601] o) a 6-O-methyltransferase (6-OMT) converting (S)-norcoclaurine into (S)-Coclaurine and/or norlaudanosoline into (S)-3′-Hydroxy-coclaurine;
[0602] p) a coclaurine-N-methyltransferase (CNMT) converting (S)-Coclaurine into (S)—N-Methylcoclaurine and/or (S)-3′-hydroxycoclaurine into (S)-3′-hydroxy-N-methyl-coclaurine;
[0603] q) a N-methyl-coclaurine hydroxylase (NMCH) converting (S)-Coclaurine into (S)-3′-hydroxycoclaurine and/or (S)—N-Methylcoclaurine into (S)-3′-Hydroxy-N-Methylcoclaurine;
[0604] r) a 3′-hydroxy-N-methyl-(S)-coclaurine 4′-O-methyltransferase (4′-OMT) converting (S)-3′-Hydroxy-N-Methylcoclaurine into (S)-reticuline;
[0605] s) a 1,2-dehydroreticuline synthase-1,2-dehydroreticuline reductase (DRS-DRR) converting (S)-Reticuline into ®-reticuline;
[0606] t) a salutaridine synthase (SAS) converting ®-reticuline into Salutaridine;
[0607] u) a salutaridine reductase (SAR) converting Salutaridine to Salutaridinol;
[0608] v) a salutaridinol 7-O-acetyltransferase (SAT) converting Salutaridinol into 7-O-acetylsalutaridinol;
[0609] w) a thebaine synthase (THS) converting 7-O-acetylsalutaridinol or 7-O-acetylsalutaridinol acetate into thebaine;
[0610] x) a demethylase converting thebaine into oripavine, thebaine into northebaine, oripavine into nororipavine and/or northebaine into nororipavine; and/or
[0611] y) a demethylase-CPR capable of reducing the demethylase of x).

[0612] Item 26. The host cell of the item 25, wherein the corresponding:
[0613] a) DAHP synthase has at least 70% identity to the DAHP synthase comprised in SEQ ID NO: 121;
[0614] b) chorismate mutase has at least 70% identity to the chorismate synthase comprised in SEQ ID NO: 123;
[0615] c) prephenate dehydrogenase (Tyr1) has at least 70% identity to the DAHP synthase comprised in SEQ ID NO: 125;
[0616] d) Tyrosine Hydroxylase (TH) has at least 70% identity to the TH comprised in SEQ ID NO: 127;
[0617] e) TH-CPR has at least 70% identity to the TH-CPR comprised in SEQ ID NO: 129;
[0618] f) DODC has at least 70% identity to the DODC comprised in SEQ ID NO: 131;
[0619] g) Norcoclaurine synthase (NCS) has at least 70% identity to the NCS comprised in SEQ ID NO: 133;
[0620] h) 6-OMT has at least 70% identity to the 6-OMT comprised in SEQ ID NO: 135;
[0621] i) CNMT has at least 70% identity to the CNMT comprised in SEQ ID NO: 137;
[0622] j) NMCH has at least 70% identity to the NMCH comprised in SEQ ID NO: 139;
[0623] k) 4′-OMT has at least 70% identity to the 4′-OMT comprised in SEQ ID NO: 141;
[0624] l) DRS-DRR has at least 70% identity to the VRS_DDR comprised in SEQ ID NO:143;
[0625] m) SAS has at least 70% identity to the SAS comprised in SEQ ID NO: 145;
[0626] n) SAT has at least 70% identity to the SAR comprised in SEQ ID NO: 147;
[0627] o) SAR has at least 70% identity to the SAT comprised in SEQ ID NO: 149;
[0628] p) THS has at least 70% identity to the THS comprised in SEQ ID NO: 151;
[0629] q) Demethylase has at least 70% identity to the demethylase comprised in anyone of SEQ ID NO: 153, 155, 157, 256, or 258; and
[0630] r) Demethylase-CPR has at least 70% identity to the demethylase-CPR comprised in anyone of SEQ ID NO: 159, 161, or 260.

[0631] Item 27. A cell culture comprising the recombinant microbial host cell of any preceding item plus cell growth medium.

[0632] Item 28. A method of producing one or more BIA, BIA-glycoside, oripavine or glycosylated oripavine or glucosylated oripavine, thebaine, northebaine, nororipavine, glycosylated nororipavine or glucosylated nororipavine, comprising:
[0633] (a) culturing the cell culture of item 27 at conditions allowing the cell to produce the BIA; and
[0634] (b) optionally recovering and/or isolating the BIA.

[0635] Item 29. The method of item 28, wherein step (a) comprises culturing in the pH range pH 3 to pH 6.5, such as pH 4 to 6, such as pH 4.5 or pH 5.5, for 5 minutes or longer, such as for 20 minutes or longer, such as for 30 minutes or longer, such as for 40 minutes or longer, such as for 60 minutes or longer, such as for 90 minutes, such as 1 day or longer.

[0636] Item 30. The method of item 28 or 29, further comprising contacting the nororipavine glycoside or oripavine glycoside with a glycosidase, at conditions allowing the glycosidase to catalyze separation of a glycosyl moiety from the nororipavine glycoside or oripavine glycoside to thereby obtain nororipavine or oripavine.

[0637] Item 31. The method of item 30, wherein the glycosidase is a β-glycosidase, such as β-glucosidase.

[0638] Item 32. The method of any of items 28 to 31, wherein the recovered and/or isolated BIA, BIA-glycoside, oripavine or glycosylated oripavine or glucosylated oripavine, thebaine, northebaine, nororipavine, glycosylated nororipavine or glucosylated nororipavine is converted into bis-benzyl nororipavine, nalbuphine, morphine, hydromorphone, codeine, hydrocodone, oxycodone, oxymorphone noroxymorphone, noroxymorphinone, buprenorphine, naloxone, naltrexone, or nalmefene.

[0639] Item 33. Use of the cell culture of item 27, or the one or more BIA, BIA-glycoside, oripavine or glycosylated oripavine or glucosylated oripavine, thebaine, northebaine, nororipavine or glycosylated nororipavine, glucosylated nororipavine, bis-benzyl nororipavine, nalbuphine, morphine, hydromorphone, codeine, hydrocodone, oxycodone, oxymorphone noroxymorphone, noroxymorphinone, buprenorphine, naloxone, naltrexone, or nalmefene, produced according to the method of any of items 28 to 32, in the manufacture of a medicament for the relief of pain, opioid use disorder (OUD), opioid overdose, and alcohol use disorder.

[0640] Item 34. The use of the BIA-glycoside of item 33, wherein the BIA-glycoside is gly-nororipavine or gly-oripavine.

[0641] Item 35. A pharmaceutical composition comprising the one or more BIA, BIA-glycoside, oripavine, thebaine, northebaine, nororipavine or glycosylated nororipavine, glucosylated nororipavine, bis-benzyl nororipavine, nalbuphine, morphine, hydromorphone, codeine, hydrocodone, oxycodone, oxymorphone noroxymorphone, noroxymorphinone, buprenorphine, naloxone, naltrexone, or nalmefene, produced according to the method of any of items 28 to 32, and one or more agents, additives and/or excipients.

[0642] Item 36. A pharmaceutical composition comprising one or more active pharmaceutical ingredients manufactured from one or more of the BIAs produced according to the method of any of items 28 to 32, in the manufacture of a medicament for the relief of pain, opioid use disorder (OUD), opioid overdose, and alcohol use disorder.

1. A recombinant microbial host cell capable of producing one or more BIA, BIA-glycoside, oripavine or glycosylated oripavine or glucosylated oripavine, thebaine, northebaine, nororipavine, glycosylated nororipavine or glucosylated nororipavine, wherein the host cell comprises a recombinant polynucleotide comprising a promoter operably linked to an ABC transporter effluxing one or more BIA or BIA-glycoside products.

2. The recombinant microbial host cell of claim 1, wherein one or more of the ABC transporters are one or more selected from:
a. present in the host cell at a gene copy number greater than in the wild type of the microbial host cell,
b. operably linked to a constitutive promoter or an inducible promoter that induces expression during cell exponential phase and BIA production, or
c. are under regulatory control such that a higher level of gene expression is induced by growth medium, growth conditions, the presence of an activator or transcription factor or absence of a repressor for an inducible promoter governing expression of the one or more endogenous ABC transporters, or any combination thereof.

3. The recombinant microbial host cell of claim 1 or 2, wherein the increased expression of one or more endogenous ABC transporters results from elevated levels of one or more transcription factors, wherein the one or more transcription factors are selected from:
a. polypeptide sequence having at least 75%, such as at least 80%, such as at least 85%, such as at least 90%, such as at least 95%, such as at least 99%, or 100% identity to SEQ ID No. 902, 904, 906, 908, or
b. encoded by a nucleic acid sequence having at least 75%, such as at least 80%, such as at least 85%, such as at least 90%, such as at least 95%, such as at least 99%, or 100% identity to SEQ ID No. 901, 903, 905, 907, or genomic DNA thereof.

4. The recombinant microbial host cell of any preceding claim, wherein the transcription factor is PDR 1, PDR3, PDR8 and/or YRR1.

5. A recombinant microbial host cell according to any preceding claim, wherein the recombinant microbial host cell excretes the BIA, BIA-glycoside, oripavine, glycosylated oripavine or glucosylated oripavine, thebaine, northebaine, nororipavine, glycosylated nororipavine or glucosylated nororipavine produced by the recombinant microbial host cell, at greater than 2%, preferably greater than 5%, preferably greater than 10%, preferably greater than 20% more excretion compared to a negative control recombinant microbial host cell not expressing the ABC transporter during cell exponential phase and BIA production.

6. A recombinant microbial host cell according to any preceding claim, wherein the recombinant microbial host cell produces the one or more of the BIAs at greater than 2%, preferably more than 5%, preferably more than 10%, preferably more than 20%, preferably more than 50% more than a negative control recombinant microbial host cell not expressing the ABC transporter during cell exponential phase and BIA production.

7. A recombinant microbial host cell according to any preceding claim, wherein the one or more excreted BIAs are thebaine, nororipavine, oripavine, glucosylated oripavine or glucosylated nororipavine.

8. The recombinant microbial host cell of any preceeding claim, wherein the ABC transporter is an ABC transporter involved in drug efflux or xenobiotic efflux.

9. The recombinant microbial host cell of any preceeding claim, wherein the ABC transporter comprises a Walker A sequence G(A/S/R)(S/T)GAGK(S/T), a linker sequence (L/V)SGG(E/Q), and a Walker B sequence comprising four hydrophobic residues, an optional additional fifth hydrophobic residue and a D such that (I/L)(I/L)(I/V/L)(F/L/M)XD where X represents the optional additional hydrophobic residue or no additional residue.

10. The recombinant microbial host cell of any preceding claim, wherein the ABC transporter is:
a. an ABCC/multi-drug resistance associated protein (MRP) ABC transporters, or
b. an ABCG/pleiotropic drug resistance (PDR) ABC transporters.

11. The recombinant microbial host cell of any preceding claim, wherein the ABC transporter is not native to a BIA-producing plant.

12. The recombinant microbial host cell of any preceding claim, wherein the ABCC/multi-drug resistance associated protein (MRP) ABC transporter is:
a. a polypeptide comprising a sequence having at least 45%, such as at least 60%, such as at least 70%, such as at least 80%, such as at least 85%, such as at least 90%, such as at least 95%, such as at least 99%, such as 100% identity to SEQ ID No. 872, 910, 912, 914, 918, 920, 922, 924, 926, 928, 930, 932, 934, 936, 938, 940, 942, 956, 960, 962, 964, 966, 970, 1032, 1034, 1038 or 1040 or
b. encoded by a nucleic acid sequence having at least 45%, such as at least 60%, such as at least 70%, such as at least 80%, such as at least 85%, such as at least 90%, such as at least 95%, such as at least 99%, such as 100% identity to SEQ ID No. 871, 909, 911, 913, 917, 919, 921, 923, 925, 927, 929, 931, 933, 935, 937, 939, 941, 955, 959, 961, 963, 965, 969, 1031, 1033, 1037 or 1039 or genomic DNA thereof.

13. The recombinant microbial host cell of any of claims 1 to 11, wherein the ABC transporter comprises Walker A sequences G(X)(I/V)G(S/T)GK where X is a residue selected from P, L, S, A, V or M and GRTGAGK, two linker sequences comprising LSGGQ and NFSLGE, and Walker B sequences (I/V/T)(I/Y/V)L(M/F/L)D and I(I/L)(I/V)(L/M)D.

14. The recombinant microbial host cell of any of claims 1 to 11, wherein the ABCG/pleiotropic drug resistance (PDR) ABC transporter is:
a. a polypeptide comprising a sequence having at least 45%, such as at least 60%, such as at least 75%, such as at least 80%, such as at least 85%, such as at least 90%, such as at least 95%, such as at least 99%, such as 100% identity to SEQ ID No. 916, 976, 980, 986, 988, 990, 994, 996, 1010, 1012, 1018, 1020, 1022, 1026, 1028 or 1030, or
b. encoded by a nucleic acid sequence having at least 70%, such as at least 80%, such as at least 85%, such as at least 90%, such as at least 95%, such as at least 99%, such as 100% identity to SEQ ID No. 915, 975, 979, 985, 987, 989, 993, 995, 1009, 1011, 1017, 1019, 1021, 1025, 1027 or 1029 or genomic DNA thereof.

15. The recombinant microbial host cell of any of claims 1 to 11 or claim 14, wherein the ABC transporter comprises Walker A sequences GRPGSGC(S/T) and G(A/S)SGAGKT, linker sequences VSGGERKRVSIA and LNVEQRKRLTIG, and Walker B sequences (F/L)QCWD and LL(V/L)F(L/F)D.

16. The recombinant microbial host cell of any preceding claim, further comprising:
a) one or more heterologous CYP demethylases capable of converting thebaine into northebaine, thebaine into oripavine, northebaine into nororipavine and/or oripavine into nororipavine, and one or more demethylase cytochrome P450 reductase (demethylase-CPR), and/or
b) heterologous sequences encoding:
i. a tyrosine hydroxylase (TH) converting L-tyrosine into L-dopa, and
ii. optionally, a TH-CPR capable of reducing the TH of i), and
iii. a L-dopa decarboxylase (DODC) converting L-dopa into dopamine, or a tyrosine decarboxylase (TYDC) converting L-dopa into dopamine, and
iv. a monoamine oxidase converting dopamine into 3,4-DHPAA, or a N-methyl-coclaurine hydroxylase (NMCH) converting (S)-Coclaurine into (S)-3′-hydroxycoclaurine and/or (S)—N-Methylcoclaurine into (S)-3′-Hydroxy-N-Methylcoclaurine; and
v. a norcoclaurine synthase (NCS) converting Dopamine and 4-HPAA into (S)-norcoclaurine and/or 3,4-DHPAA and dopamine to NLDS, and
vi. a 6-O-methyltransferase (6-OMT) converting (S)-norcoclaurine into (S)-Coclaurine and/or norlaudanosoline into (S)-3′-Hydroxy-coclaurine, and
vii. a coclaurine-N-methyltransferase (CNMT) converting (S)-Coclaurine into (S)—N-Methylcoclaurine and/or (S)-3′-hydroxycoclaurine into (S)-3′-hydroxy-N-methyl-coclaurine, and
viii. a 3′-hydroxy-N-methyl-(S)-coclaurine 4′-O-methyltransferase (4′-OMT) converting (S)-3′-Hydroxy-N-Methylcoclaurine into (S)-reticuline, and
ix. a 1,2-dehydroreticuline synthase-1,2-dehydroreticuline reductase (DRS-DRR) converting (S)-reticuline into (R)-reticuline comprised of one or more proteins, and
x. a salutaridine synthase (SAS) converting (R)-reticuline into Salutaridine, and
xi. a salutaridine reductase (SAR) converting Salutaridine to Salutaridinol, and
xii. a salutaridinol 7-O-acetyltransferase (SAT) converting Salutaridinol into 7-O-acetylsalutaridinol, and
xiii. a thebaine synthase (THS) converting 7-O-acetylsalutaridinol or 7-O-acetylsalutaridinol acetate into thebaine;
c) and optionally, one or more glycosyl transferases capable of transferring a glycosyl moiety to a BIA, oripavine or nororipavine.

17. The recombinant microbial host cell of claim 16, wherein the one or more demethylases is:
a. an N-demethylase comprising a polypeptide sequence having at least 75%, such as at least 85%, such as at least 90% or at least 95% identity to SEQ ID No. 140, 152, 198, 250, 252, 843, or
b. an N-demethylase encoded by a nucleic acid sequence having at least 75%, such as at least 85%, such as at least 90% or at least 95% identity to 141, 153, 199, 251, 253, 844, or genomic DNA thereof, or
c. an O-demethylase comprising a polypeptide sequence having at least 75%, such as at least 85%, such as at least 90% or at least 95% identity to SEQ ID No. 198, 222, 224, 236, or
d. an O-demethylase encoded by a nucleic acid sequence having at least 75%, such as at least 85%, such as at least 90% or at least 95% identity to SEQ ID No. 199, 223, 225, or 237, or genomic DNA thereof.

18. The recombinant microbial host cell of claim 16 or 17, wherein the one or more CPRs:
a. comprises a polypeptide sequence having 75%, such as at least 85%, such as at least 90% or at least 95% identity to SEQ ID No. 292 or 305, or
b. is encoded by a nucleic acid sequence having at least 75%, such as at least 85%, such as at least 90% or at least 95% identity to SEQ ID No. 293 or 306, or genomic DNA thereof.

19. The recombinant microbial host cell of any preceding claim, wherein the one or more glycosyltransferases (UGT) is an aglycone O-UGT or an aglycone O-glucosyltransferase.

20. The recombinant microbial host cell of any preceding claim, wherein the one or more glycosyltransferases (UGT):
a. comprises an amino acid sequence having at least 60%, such as at least 70%, such at least 75%, such as at least 80%, such as at least 90%, such as at least 95%, such as at least 99%, such as 100% identity to a UGT comprised in any one of SEQ ID NO: 880, 882, 878, 884, 886, 888, 890, 892, 894, 896, or 898; or
b. is encoded by a nucleic acid sequence having at least 60%, such as at least 70%, such at least 75%, such as at least 80%, such as at least 90%, such as at least 95%, such as at least 99%, such as 100% identity to SEQ ID No. 879, 881, 877, 883, 885, 887, 889, 891, 893, 895 or 897, or genomic DNA thereof.

21. The recombinant microbial host cell of any preceding claim, wherein the recombinant microbial host cell is a yeast.

22. The recombinant microbial host cell of any preceding claim, wherein the recombinant microbial host cell is Saccharomyces cerevisiae.

23. The recombinant microbial host cell of any preceding claim, further comprising an uptake transporter capable of transporting an opioid, such as oripavine, into the recombinant host cell.

24. The recombinant microbial host cell of claim 23, wherein the uptake transporter is a polypeptide:
a. comprising an amino acid sequence having at least 60%, such as at least 70%, such at least 75%, such as at least 80%, such as at least 90%, such as at least 95%, such as at least 99%, such as 100% identity to an uptake transporter comprised in any one of SEQ ID NO: 307, 311, 317, 461, 473, 733, or 735.
b. encoded by a nucleic acid sequence comprising at least 60%, such as at least 70%, such at least 75%, such as at least 80%, such as at least 90%, such as at least 95%, such as at least 99%, such as 100% identity to 308, 312, 318, 462, 474, 734, 736, or genomic DNA thereof.

25. The recombinant microbial host cell of any preceding claim, further comprising an operative biosynthetic pathway capable of producing the thebaine, northebaine, oripavine and/or nororipavine, wherein the pathway comprises one or more polypeptides selected from:
a) a 3-deoxy-D-arabino-2-heptulosonic acid 7-phosphate synthase (DAHP synthase) converting PEP and E4P into DAHP;
b) a 5-enolpyruvylshikimate-3-phosphate (EPSP) synthase (aro1) converting 3-phosphoshikimate and PEP into EPSP;
c) an aro1 polypeptide converting DHAP and PEP into EPSP;
d) a chorismate synthase converting EPSP into Chorismate;
e) a chorismate mutase converting Chorismate into prephenate;
f) a prephenate dehydrogenase (Tyr1) converting prephenate into 4-HPP;
g) an aromatic aminotransferase converting 4-HPP into L-Tyrosine;
h) a tyrosine hydroxylase (TH) converting L-tyrosine into L-dopa
i) a TH-CPR capable of reducing the TH of h);
j) a L-dopa decarboxylase (DODC) converting L-dopa into dopamine;
k) a Tyrosine decarboxylase (TYDC) converting L-dopa into dopamine;
l) a hydroxyphenylpyruvate decarboxylase (HPPDC) converting 4-HPP into 4-HPPA;
m) a monoamine oxidase converting dopamine into 3,4-DHPAA;
n) a norcoclaurine synthase (NCS) converting Dopamine and 4-HPAA into (S)-norcoclaurine;
o) a 6-O-methyltransferase (6-OMT) converting (S)-norcoclaurine into (S)-Coclaurine and/or norlaudanosoline into (S)-3′-Hydroxy-coclaurine;
p) a coclaurine-N-methyltransferase (CNMT) converting (S)-Coclaurine into (S)—N-Methylcoclaurine and/or (S)-3′-hydroxycoclaurine into (S)-3′-hydroxy-N-methyl-coclaurine;
q) a N-methyl-coclaurine hydroxylase (NMCH) converting (S)-Coclaurine into (S)-3′-hydroxycoclaurine and/or (S)—N-Methylcoclaurine into (S)-3′-Hydroxy-N-Methylcoclaurine;
r) a 3′-hydroxy-N-methyl-(S)-coclaurine 4′-O-methyltransferase (4′-OMT) converting (S)-3′-Hydroxy-N-Methylcoclaurine into (S)-reticuline;
s) a 1,2-dehydroreticuline synthase-1,2-dehydroreticuline reductase (DRS-DRR) converting (S)-Reticuline into (R)-reticuline;
t) a salutaridine synthase (SAS) converting (R)-reticuline into Salutaridine;
u) a salutaridine reductase (SAR) converting Salutaridine to Salutaridinol;
v) a salutaridinol 7-O-acetyltransferase (SAT) converting Salutaridinol into 7-O-acetylsalutaridinol;
w) a thebaine synthase (THS) converting 7-O-acetylsalutaridinol or 7-O-acetylsalutaridinol acetate into thebaine;
x) a demethylase converting thebaine into oripavine, thebaine into northebaine, oripavine into nororipavine and/or northebaine into nororipavine; and/or
y) a demethylase-CPR capable of reducing the demethylase of x).

26. The host cell of the claim 25, wherein the corresponding:
a) DAHP synthase has at least 70% identity to the DAHP synthase comprised in SEQ ID NO: 121;
b) chorismate mutase has at least 70% identity to the chorismate synthase comprised in SEQ ID NO: 123;
c) prephenate dehydrogenase (Tyr1) has at least 70% identity to the DAHP synthase comprised in SEQ ID NO: 125;
d) Tyrosine Hydroxylase (TH) has at least 70% identity to the TH comprised in SEQ ID NO: 127;
e) TH-CPR has at least 70% identity to the TH-CPR comprised in SEQ ID NO: 129;
f) DODC has at least 70% identity to the DODC comprised in SEQ ID NO: 131;
g) Norcoclaurine synthase (NCS) has at least 70% identity to the NCS comprised in SEQ ID NO: 133;
h) 6-OMT has at least 70% identity to the 6-OMT comprised in SEQ ID NO: 135;
i) CNMT has at least 70% identity to the CNMT comprised in SEQ ID NO: 137;
j) NMCH has at least 70% identity to the NMCH comprised in SEQ ID NO: 139;
k) 4′-OMT has at least 70% identity to the 4′-OMT comprised in SEQ ID NO: 141;
l) DRS-DRR has at least 70% identity to the VRS_DDR comprised in SEQ ID NO:143;
m) SAS has at least 70% identity to the SAS comprised in SEQ ID NO: 145;
n) SAT has at least 70% identity to the SAR comprised in SEQ ID NO: 147;
o. SAR has at least 70% identity to the SAT comprised in SEQ ID NO: 149;
p) THS has at least 70% identity to the THS comprised in SEQ ID NO: 151;
q) Demethylase has at least 70% identity to the demethylase comprised in anyone of SEQ ID NO: 153, 155, 157, 256, or 258; and
r) Demethylase-CPR has at least 70% identity to the demethylase-CPR comprised in anyone of SEQ ID NO: 159, 161, or 260.

27. A cell culture comprising the recombinant microbial host cell of any preceding claim plus cell growth medium.

28. A method of producing one or more BIA, BIA-glycoside, oripavine or glycosylated oripavine or glucosylated oripavine, thebaine, northebaine, nororipavine, glycosylated nororipavine or glucosylated nororipavine, comprising:
(a) culturing the cell culture of claim 27 at conditions allowing the cell to produce the BIA; and
(b) optionally recovering and/or isolating the BIA.

29. The method of claim 28, wherein step (a) comprises culturing in the pH range pH 3 to pH 6.5, such as pH 4 to 6, such as pH 4.5 or pH 5.5, for 5 minutes or longer, such as for 20 minutes or longer, such as for 30 minutes or longer, such as for 40 minutes or longer, such as for 60 minutes or longer, such as for 90 minutes, such as 1 day or longer.

30. The method of claim 28 or 29, further comprising contacting the nororipavine glycoside or oripavine glycoside with a glycosidase, at conditions allowing the glycosidase to catalyze separation of a glycosyl moiety from the nororipavine glycoside or oripavine glycoside to thereby obtain nororipavine or oripavine.

31. The method of claim 30, wherein the glycosidase is a β-glycosidase, such as β-glucosidase.

32. The method of any of claims 28 to 31, wherein the recovered and/or isolated BIA, BIA-glycoside, oripavine or glycosylated oripavine or glucosylated oripavine, thebaine, northebaine, nororipavine, glycosylated nororipavine or glucosylated nororipavine is converted into bis-benzyl nororipavine, nalbuphine, morphine, hydromorphone, codeine, hydrocodone, oxycodone, oxymorphone noroxymorphone, noroxymorphinone, buprenorphine, naloxone, naltrexone, or nalmefene.

33. Use of the cell culture of claim 27, or the one or more BIA, BIA-glycoside, oripavine or glycosylated oripavine or glucosylated oripavine, thebaine, northebaine, nororipavine or glycosylated nororipavine, glucosylated nororipavine, bis-benzyl nororipavine, nalbuphine, morphine, hydromorphone, codeine, hydrocodone, oxycodone, oxymorphone noroxymorphone, noroxymorphinone, buprenorphine, naloxone, naltrexone, or nalmefene, produced according to the method of any of claims 28 to 32, in the manufacture of a medicament for the relief of pain, opioid use disorder (OUD), opioid overdose, and alcohol use disorder.

34. The use of the BIA-glycoside of claim 33, wherein the BIA-glycoside is gly-nororipavine or gly-oripavine.

35. A pharmaceutical composition comprising the one or more BIA, BIA-glycoside, oripavine, thebaine, northebaine, nororipavine or glycosylated nororipavine, glucosylated nororipavine, bis-benzyl nororipavine, nalbuphine, morphine, hydromorphone, codeine, hydrocodone, oxycodone, oxymorphone noroxymorphone, noroxymorphinone, buprenorphine, naloxone, naltrexone, or nalmefene, produced according to the method of any of claims 28 to 32, and one or more agents, additives and/or excipients.

36. A pharmaceutical composition comprising one or more active pharmaceutical ingredients manufactured from one or more of the BIAs produced according to the method of any of claims 28 to 32, in the manufacture of a medicament for the relief of pain, opioid use disorder (OUD), opioid overdose, and alcohol use disorder.

The application's sequence listing, which the Patent Office published only in electronic form, follows.

SEQUENCE LISTING (1067 sequences)

SEQ ID NO: 1 - protein, 370 aa, synthetic construct
MSESPMFAANGMPKVNQGAEEDVRILGYDPLASPALLQVQIPATPTSLETAKRGRREAIDIITGKDDRVLVIVGPCSIHDLEAAQEYALRLKKLSDELKGDLSIIMRAYLEKPRTTVGWKGLINDPDVNNTFNINKGLQSARQLFVNLTNIGLPIGSEMLDTISPQYLADLVSFGAIGARTTESQLHRELASGLSFPVGFKNGTDGTLNVAVDACQAAAHSHHFMGVTLHGVAAITTTKGNEHCFVILRGGKKGTNYDAKSVAEAKAQLPAGSNGLMIDYSHGNSNKDFRNQPKVNDVVCEQIANGENAITGVMIESNINEGNQGIPAEGKAGLKYGVSITDACIGWETTEDVLRKLAAAVRQRREVNKK

SEQ ID NO: 2 - DNA, 1113 bp, synthetic construct
  source 1..1113: mol_type = other DNA
atgagtgaatctccaatgttcgctgccaacggcatgccaaaggtaaatcaaggtgctgaagaagatgtcagaattttaggttacgacccattagcttctccagctctccttcaagtgcaaatcccagccacaccaacttctttggaaactgccaagagaggtagaagagaagctatagatattattaccggtaaagacgacagagttcttgtcattgtcggtccttgttccatccatgatctagaagccgctcaagaatacgctttgagattaaagaaattgtcagatgaattaaaaggtgatttatccatcattatgagagcatacttggagaagccaagaacaaccgtcggctggaaaggtctaattaatgaccctgatgttaacaacactttcaacatcaacaagggtttgcaatccgctagacaattgtttgtcaacttgacaaatatcggtttgccaattggttctgaaatgcttgataccatttctcctcaatacttggctgatttggtctccttcggtgccattggtgccagaaccaccgaatctcaactgcacagagaattggcctccggtttgtctttcccagttggtttcaagaacggtaccgatggtaccttaaatgttgctgtggatgcttgtcaagccgctgctcattctcaccatttcatgggtgttactttgcatggtgttgctgctatcaccactactaagggtaacgaacactgcttcgttattctaagaggtggtaaaaagggtaccaactacgacgctaagtccgttgcagaagctaaggctcaattgcctgccggttccaacggtctaatgattgactactctcacggtaactccaataaggatttcagaaaccaaccaaaggtcaatgacgttgtttgtgagcaaatcgctaacggtgaaaacgccattaccggtgtcatgattgaatcaaacatcaacgaaggtaaccaaggcatcccagccgaaggtaaagccggcttgaaatatggtgtttccatcactgatgcttgtataggttgggaaactactgaagacgtcttgaggaaattggctgctgctgtcagacaaagaagagaagttaacaagaaatag

SEQ ID NO: 3 - protein, 256 aa, synthetic construct
MDFTKPETVLNLQNIRDELVRMEDSIIFKFIERSHFATCPSVYEANHPGLEIPNFKGSFLDWALSNLEIAHSRIRRFESPDETPFFPDKIQKSFLPSINYPQILAPYAPEVNYNDKIKKVYIEKIIPLISKRDGDDKNNFSSVATRDIECLQSLSRRIHFGKFVAEAKFQSDIPLYTKLIKSKDVEGIMKNITNSAVEEKILERLTKKAEVYGVDPTNESGERRITPEYLVKIYKEIVIPITKEVEVEYLLRRLEE

SEQ ID NO: 4 - DNA, 771 bp, synthetic construct
  source 1..771: mol_type = other DNA
atggacttcactaagccagaaaccgttttgaacttgcagaacatcagagatgaattggtcaggatggaagattccatcatcttcaagttcatcgagagatctcatttcgctacttgtccatctgtttacgaagctaatcatccaggtttggaaatcccaaatttcaagggttcttttttggattgggccttgtccaatttggaaattgctcactctagaatcagaaggtttgaatctccagacgaaactccatttttcccagataagatccagaagtctttcctgccatctattaactacccacaaattttggctccatacgcacctgaagttaactacaacgataagattaagaaggtctacatcgagaagatcatcccattgatttctaagcgtgatggtgatgacaagaacaacttttcatctgttgccaccagagatatcgaatgcttgcaatctttgtccagaagaatccatttcggtaagtttgttgctgaagccaagttccaatctgatatcccattatacaccaagctgatcaagtccaaagatgtcgaaggtatcatgaagaacattaccaactctgccgttgaagaaaagatcttggaaagattgaccaaaaaggccgaagtttatggtgttgatccaactaatgaatccggtgaaagaagaattaccccagaatacttggtcaagatctacaaagaaatcgtcatcccaatcaccaaagaagtggaagttgaatacttgttgagaaggttggaagaataa

SEQ ID NO: 5 - protein, 452 aa, Saccharomyces cerevisiae
MVSEDKIEQWKATKVIGIIGLGDMGLLYANKFTDAGWGVICCDREEYYDELKEKYASAKFELVKNGHLVSRQSDYIIYSVEASNISKIVATYGPSSKVGTIVGGQTSCKLPEIEAFEKYLPKDCDIITVHSLHGPKVNTEGQPLVIINHRSQYPESFEFVNSVMACLKSKQVYLTYEEHDKITADTQAVTHAAFLSMGSAWAKIKIYPWTLGVNKWYGGLENVKVNISLRIYSNKWHVYAGLAITNPSAHQQILQYATSATELFSLMIDNKEQELTDRLLKAKQFVFGKHTGLLLLDDTILEKYSLSKSSIGNSNNCKPVPNSHLSLLAIVDSWFQLGIDPYDHMICSTPLFRIFLGVSEYLFLKPGLLEQTIDAAIHDKSFIKDDLEFVISAREWSSVVSFANFDIYKKQFQSVQKFFEPMLPEANLIGNEMIKTILSHSSDRSAAEKRNT

SEQ ID NO: 6 - DNA, 1359 bp, Saccharomyces cerevisiae
  source 1..1359: mol_type = other DNA
atggtatcagaggataagattgagcaatggaaagccacaaaagtcattggtataattggtctgggtgatatgggcctattatacgctaataaatttacagatgctggatggggtgttatatgttgtgatagggaagaatattatgatgaactgaaagaaaaatatgcctcagctaaattcgaactggtgaaaaatggtcatttggtatccaggcaaagcgactatattatctatagtgttgaagcatccaatattagtaagatcgtcgcaacgtatggaccatcttctaaggttggaacaattgttgggggtcaaacgagttgtaagctgccggaaatcgaggctttcgaaaagtatttacccaaggactgcgacatcattaccgtgcattcccttcatgggcctaaagttaatactgaaggccaaccactagttattatcaatcacagatcacagtacccagaatcttttgagttcgttaattctgttatggcatgtttgaaaagtaagcaagtttatttgacatatgaagagcatgacaagattaccgctgatacacaagctgtgacacatgctgctttcttaagtatgggatctgcgtgggcaaagataaagatttatccttggactctgggtgtaaacaaatggtacggtggcctagaaaatgtgaaagttaatatatcactaagaatctattcgaacaagtggcatgtttacgcaggattagccataacaaacccaagtgcacatcagcaaattcttcaatatgcaaccagtgcaacagaactatttagtttaatgatagataacaaagaacaagaacttactgatagactattaaaagctaagcaatttgtatttggaaagcatactggtctcttactattggatgacacgattttagagaaatattcgctatcaaaaagcagcattggtaacagcaacaattgcaagccagtgccgaattcacatttatcattgttggcgattgttgattcgtggtttcaacttggtattgatccatatgatcatatgatttgttcgacgccattattcagaatattcctgggtgtgtccgaatatctttttttaaaacctggcttattagaacagacaattgatgcagctatccatgataaatcattcataaaagatgatttagaatttgttatttcggctagagaatggagctcggttgtttcttttgccaattttgatatatacaaaaagcaatttcagagtgttcaaaagttctttgagccaatgcttccagaggctaatctcattggcaacgagatgataaaaaccattctgagtcattctagtgaccgttcggccgctgaaaaaagaaatacataa

SEQ ID NO: 7 - protein, 495 aa, Spinacia oleracea
MENTTLALILPILFICFHLIHSFICQSRKSSKLPPGPKRMPIFGNIFDLGEKPHRSFANLAKIHGPLVSLKLGSITTIVVSSAEVAKEMFLKNDQLLSNRTIPDSVRAGDHDKLSMSWLPVSAKWRNLRKISAVQLLSNQRLDASQAQRQAKVKQLLAYVQDCSKKGQPVDIGRAAFTTSLNLLSNTFFSVELASHESSVSQEFKQLMWNMMEEIGRPNYADYFPILGYVDPFGIRRRLAAYFDQLIVVFQDIIRERQKVRSTNGSNAKQTNDILDTLLNLHLSMGEINHLLADIFNAGTDTTASTLEWAMTELVKNPNMMGRVQNEIEQALGRDCSSIQESDILKLPYLQAIIKETLRLHPPTVFLLPRKADTDVELNGYLVPKNAQVLVNLWAIGRDPKVWENPEVFLPERFLNSEIDVKGRDFELLPFGAGRRICPGLTLAYRMLNLMLATLVNNYDWKLEDGMNPENLDMDEKFGITLQKVNPLRAIPIPR

SEQ ID NO: 8 - DNA, 1500 bp, Spinacia oleracea
  source 1..1500: mol_type = other DNA
atggaaaacaccaccttggccttgattttgccaattttgttcatctgcttccacctgatccattccttcatttgccaatccagaaagtcctctaaattgccaccaggtccaaaaagaatgccaatctttggtaacatcttcgacttgggtgaaaagccacatagatcttttgctaacttggctaagattcacggtccattggtttctttgaagttgggttctatcactaccatcgttgtttcatcagctgaagttgccaaagaaatgttcttgaagaacgaccagttgttgtccaacagaactattccagattctgttagagctggtgatcacgataagttgtctatgtcttggttgccagtttctgctaaatggcgtaacttgagaaagatttctgctgtgcagctgttgtctaatcaaagattagatgcttcccaagctcaaagacaagctaaagtcaaacagttgttggcttacgttcaagactgttctaaaaagggtcaaccagttgatattggtagagctgcttttactacctccttgaacttgttgtcaaacaccttcttctctgttgaattggcctctcatgaatcctctgtttctcaagaattcaagcagttgatgtggaacatgatggaagaaattggtagaccaaactacgctgattacttcccaattttgggttacgttgatcctttcggtatcagaagaagattggctgcttactttgaccaattgatcgttgtgttccaagacatcatcagagaaagacaaaaagtcaggtctacgaatggttctaacgctaagcaaactaacgatatcttggacaccttgttgaacttgcatggtgaaaacgaattgtccatgggtgaaatcaatcatttgttggccgatattttcaacgctggtactgatacaactgcttctactttggaatgggctatgactgaattggttaagaacccaaatatgatgggtagagtccagaacgaaattgaacaagctttgggtagagattgctcctccattcaagaatctgacatcttgaaattgccatacttgcaggccattatcaaagagactttgagattgcatccaccaaccgtttttttgttgccaagaaaagctgatactgacgtcgaattgaacggttatttggttccaaagaacgcccaagttttggttaatttgtgggctataggtagagatccaaaggtttgggaaaatccagaagttttcttgccagaacgtttcttgaactccgaaattgatgttaagggcagagattttgagttgttgccatttggtgctggtagaagaatttgtccaggtttgacattggcttacaggatgttgaatttgatgttggctaccttggttaacaactacgattggaaattggaggatggtatgaacccagaaaatttggatatggacgaaaagttcggtattaccttgcaaaaggttaacccattgagagccattccaattccaagatga

SEQ ID NO: 9 - protein, 494 aa, Opuntia ficus-indica
MDHAILATLVCILFVCFHLLWRRSYKNSSKLPPGPKPVPIFGNIFELGEKPHRSFADLAKIHGPLISLKLGSVTTIVVSSSDVAKEMFLKHDQVFANRTIPDSVRAGNHDKLSMSWLPVSAKWRNMRKISAVQLLSTQRLDSNQGLRQAKVQQLLEYVQECCKKGQPVDIGRAAFTTSLNLLSNTFFSMELAQHSSSASQEFKQLMWCIMEEIGRPNYADYFPILGYFDPFGIRRRLTAYFDKLIAIFQDIIHERLKARSTGSSSTNDILDTLLNLYQENELSMDEINHLLVDIFDAGTDTTASTLEWAMAELVKNPEIMIKAQDEINAALGKDCSVIHESDIVKLPYLQAIVKETLRLHPPTVFLLPRKADLDVELYGYVVPKNAQILVNLWAIGRDPKVWSNPEVFSPERFLDSTIDVKGRDFELLPFGAGRRICPGLTLASRMLNLMLATLVHNFNWKLEDGMIPKDLDMTEKFGITLQKVNPLQVIPIQK

SEQ ID NO: 10 - DNA, 1485 bp, Opuntia ficus-indica
  source 1..1485: mol_type = other DNA
atggatcatgctattttggctaccttggtctgcattttgttcgtttgttttcatttgttgtggcgtaggtcctacaagaactcttctaaattgccaccaggtccaaaaccagttccaatttttggtaacatcttcgagttgggtgaaaagccacatagatcttttgctgatttggccaagattcacggtccattgatttctttgaaattgggttctgtcacgacgatcgttgtttcttcttctgatgttgccaaagaaatgttcttgaagcacgatcaagttttcgccaacagaactattccagattctgttagagctggtaaccacgataagttgtctatgtcttggttgccagtttctgctaaatggcgtaacatgagaaagatttctgctgtccaactgttgtctacccaaagattggattctaatcaaggtttgagacaagccaaggttcaacagttgttggaatacgttcaagaatgttgcaaaaagggtcaaccagttgatattggtagagctgcttttactacctccttgaacttgttgtctaacaccttcttctctatggaattggctcaacattcatcctctgcttctcaagaattcaagcaattgatgtggtgcatcatggaagaaattggtagaccaaattacgccgattacttcccaattttgggttactttgatccattcggtatcagacgtagattgactgcttacttcgacaagttgattgccatcttccaagatatcatccacgaaagattgaaggctagatctactggttcctcttctaccaacgatattttggacactctgctgaacttgtaccaagaaaacgaattgtctatggacgagatcaaccacttgttggttgatatttttgatgccggtactgataccactgcttctactttggaatgggctatggctgaattggttaagaacccagaaattatgattaaggcccaggatgagattaacgctgctttgggtaaagattgctccgttatccatgaatccgatatcgttaagttgccatacttgcaagccattgtcaaagaaaccttgagattgcatccaccaactgtttttttgttgcctagaaaagccgatttggatgttgagttgtatggttacgttgttccaaagaacgcccaaatcttggttaatttgtgggctataggtagagatccaaaggtttggtctaatccagaagttttctcaccagaaagattcttggactctaccattgatgttaagggtagagattttgagttgttgccatttggtgcaggtagaagaatttgtccaggtttgactttggcttccagaatgttgaatttgatgttggccactttggtccataacttcaactggaaattagaggatggtatgatcccaaaggatttggatatgactgaaaagttcggtattaccttgcagaaggttaacccattgcaagttattcccatccaaaagtaa

SEQ ID NO: 11 - protein, 498 aa, Froelichia latifolia
MDNTTLAVVLSVMFVLFHLLKTIFTNSSNNKLPPGPKRMPIFGNIFDLGEKPHRSFANFAKIHGPLISLKLGSVTTIVVSSASVAEEMFLKNDQALANRTIPDSVRAGDHDKLSMSWLPVSAKWRNLRKISAVQLLSNQRLDASQPLRQAKVKQLLAYVQNCSEKNQAVDIGRAAFTTSLNLLSNTFFSMELASHESSASQEFKQLMWNIMEEIGRPNYADFFPILGYIDPFGIRRRLAGYFDKLIDVFQDIIRERQKIRASNANGTKQTSDILDTLLKLYEDNELSMGEINHLLVDIFDAGTDTTASTLEWAMAELVKNPEMMVRAQNEIEEVLGKDCSNIQESDISKLPYLQAIIKESLRLHPPTVFLLPRKADVDVELYGYVVPKNAQVLVNLWAIGRDPKVWKNPEVFSPERFLECDIDYKGRDFELLPFGAGRRICPGLTLAYRMLNLMLATLLHNYNWKLGDDMDPKDLDMEEKFGITLQKIKPLQVIPVAR

SEQ ID NO: 12 - DNA, 1496 bp, Froelichia latifolia
  source 1..1496: mol_type = other DNA
tggacaacactaccttggccgttgttttgtctgttatgttcgttttgttccacctgttgaaaaccatcttcaccaactcttctaacaacaaattgccaccaggtccaaagagaatgccaatttttggtaacatcttcgacttgggtgaaaagccacatagatcttttgctaacttcgccaaaattcacggtccattgatttctttgaagttgggttctgttacgacgatcgttgtttcttctgcttctgttgctgaagagatgttcttgaagaatgatcaagctttggccaacagaaccattccagattctgttagagctggtgatcatgacaaattgtctatgtcttggttgccagtttctgctaaatggcgtaacttgagaaagatttctgctgtccagttgttgtctaaccagagattggatgcttctcaaccattgagacaagctaaagttaagcagttgttggcctacgttcaaaactgctctgaaaagaatcaagccgttgatattggtagagctgctttcactacttccttgaacttgttgtccaacaccttcttctctatggaattggcttctcatgaatcctctgcttcccaagaattcaaacaattgatgtggaacatcatggaagaaatcggtagaccaaattacgccgattttttcccaatcttgggttacattgatccattcggtatcagaagaagattggctggttacttcgataagttgatcgatgttttccaggacatcatcagagaaagacaaaagattagagcctctaacgctaacggtactaagcaaacttctgatatcttggacaccctgttgaagttgtacgaagataacgaattatccatgggtgagatcaaccacttgttggttgatatttttgatgccggtactgataccactgcttctactttggaatgggctatggctgaattggttaagaatccagaaatgatggttagagcccagaacgaaattgaagaagttttgggtaaagactgctccaacatccaagaatccgatatttctaagttgccatacttgcaggccatcatcaaagagtctttaagattgcatccaccaaccgtttttctgttgccaagaaaagctgatgttgatgtcgaattatacggttacgttgttccaaagaacgcccaagttttggttaatttgtgggctataggtagagatccaaaggtttggaaaaacccagaagttttctcaccagaaaggttcttggaatgcgatattgattacaagggtagagactttgagttgttgccatttggtgctggtagaagaatttgtccaggtttgactttggcttacaggatgttgaatttgatgttggctaccttgttgcacaactacaattggaaattgggtgatgatatggacccaaaggacttggatatggaagagaaatttggtatcaccctgcagaagattaagccattgcaagttattccagttgccaggtaa

SEQ ID NO: 13 - protein, 498 aa, Beta vulgaris
MDNATLAVILSILFVFYHIFKSFFTNSSSRRLPPGPKPVPIFGNIFDLGEKPHRSFANLSKIHGPLISLKLGSVTTIVVSSASVAEEMFLKNDQALANRTIPDSVRAGDHDKLSMSWLPVSQKWRNMRKISAVQLLSNQKLDASQPLRQAKVKQLLSYVQVCSEKMQPVDIGRAAFTTSLNLLSNTFFSIELASHESSASQEFKQLMWNIMEEIGRPNYADFFPILGYIDPFGIRRRLAGYFDKLIDVFQDIIRERQKLRSSNSSGAKQTNDILDTLLKLHEDNELSMPEINHLLVDIFDAGTDTTASTLEWAMAELVKNPEMMTKVQIEIEQALGKDCLDIQESDISKLPYLQAIIKETLRLHPPTVFLLPRKADNDVELYGYVVPKNAQVLVNLWAIGRDPKVWKNPEVFSPERFLDCNIDYKGRDFELLPFGAGRRICPGLTLAYRMLNLMLATLLQNYNWKLEDGINPKDLDMDEKFGITLQKVKPLQVIPVPR

SEQ ID NO: 14 - DNA, 1497 bp, Beta vulgaris
  source 1..1497: mol_type = other DNA
atggataacgctaccttggccgttatcttgtctattttgttcgttttctaccacatcttcaagtcgttcttcaccaactcttcatctagaagattgccaccaggtccaaaaccagttccaatttttggtaacatcttcgacttgggtgaaaagccacatagatcttttgctaacttgtccaagattcacggtccattgatttctttgaagttgggttctgttacgacgatcgttgtttcttctgcttctgttgctgaagagatgttcttgaagaatgatcaagctttggccaacagaaccattccagattctgttagagctggtgatcatgacaaattgtctatgtcttggttgccagtttctcaaaagtggcgtaacatgagaaagatttctgctgttcagttgctgtccaatcaaaagttggatgcttctcaaccattgagacaagctaaagttaagcagttgttgtcctacgttcaagtctgctctgaaaaaatgcaaccagttgatattggtagagctgctttcactacttccttgaacttgttgtctaacaccttcttctccattgaattggcctctcatgaatcttcagcttcccaagaattcaagcaattgatgtggaacatcatggaagaaatcggtagaccaaattacgccgattttttcccaatcttgggttacattgatccattcggtatcagaagaagattggctggttacttcgataagttgatcgatgttttccaggacatcatcagagaaagacagaagttgagatcctctaattcttctggtgctaagcaaactaacgacatcttggatactttgttgaagttgcacgaagataacgagttgtctatgccagaaatcaaccacttgttggttgatattttcgatgctggtactgataccactgcttctactttggaatgggctatggctgaattggttaagaatccagaaatgatgaccaaggtccagatcgaaattgaacaagctttaggtaaggattgcttggacatccaagaatccgatatttctaagttgccatacttgcaggccatcatcaaagagactttgagattgcatccaccaaccgtttttttgttgccaagaaaggctgataacgatgttgagttgtatggttacgttgttccaaagaacgctcaagttttggttaacttgtgggctataggtagagatccaaaggtttggaaaaacccagaagttttctcaccagaaaggttcttggattgcaacattgattacaagggtagagacttcgagttgttgccatttggtgctggtagaagaatttgtccaggtttgactttggcttacaggatgttgaatttgatgttggctaccttgttgcagaactacaattggaaattggaggatggtatcaacccaaaggacttggatatggacgaaaagtttggtatcaccttgcaaaaggttaagccattgcaagttattcccgttccaagatga

SEQ ID NO: 15 - protein, 503 aa, Abronia nealleyi
MENTTLGVILATIFLTFHIMKMLLSPNKAKLPPGPRPLPIIGNILELGDKPHRSFANLAKIYGPLITLRLGSVTTVVVSSSQVAKEMFLKNDQSLANRTIPDSVRAGNHHKLSMSWLPVSAKWRNFRKISAVELLSSQRLDASQAHRQAKVEQLIEYVKECSKIGQCVDIGRLAFTTSLNLLSNTFFSKELASLDSNNAQEFKQLMWCIMEEIGRPNYADYFPILGYVDPFGVRRRLSRYFDQLIEVFQEIIRERLSKNNEKVDNKNDILATLLHLYKQNELSMDEINHLLVDIFDAGTDTTASTLEWAMSELIKNPHIMSKAQAEVRRATVSHGGATVAAVQESDISNLPYIQSIIKETLRLHPPTVFLLPRKADVDVQLYGYVVPKNAQVLVNLWAIGRDPNVWPDPEVFRPERFMDCGVDVKGRDFELLPFGAGRRICPGLSLAYRMLNLMLANLVHSFDWKLPDSGNGFGSDPNGLDMDEKFGITLQKVEPLKVIPTPR

SEQ ID NO: 16 - DNA, 1512 bp, Abronia nealleyi
  source 1..1512: mol_type = other DNA
atggaaaacaccaccttgggtgttattttggctactattttcttgaccttccacatcatgaagatgctgttgtctccaaacaaagctaaattgccaccaggtccaagaccattgccaattattggtaacattttggagttgggtgataagccacatagatcttttgctaacttggctaaaatctacggtccattgattaccttgagattgggttctgttactaccgttgttgtctcttcatctcaagttgccaaagaaatgttcttgaagaacgatcaatccttggccaacagaactattccagattctgttagagctggtaaccatcacaaattgtctatgtcttggttgccagtttctgctaagtggcgtaatttcagaaagatttctgccgttgagttgttgtcctctcaaagattggatgcttctcaagctcatagacaagctaaggttgaacagttgatcgaatacgtcaaagagtgctctaagattggtcaatgcgttgatattggtagattggctttcaccacttccttgaacttgttgtctaacaccttcttcagcaaagaattggcctctttggattctaacaacgcccaagaattcaagcaattgatgtggtgcattatggaagaaatcggtagaccaaattacgctgattacttcccaattttgggttacgttgatccattcggtgttagaagaagattgtccagatacttcgaccagttgattgaagtgttccaagaaatcatcagagagaggttgtctaagaacaacgaaaaggttgataacaagaacgacattttggccactttgctgcacttgtacaaacagaatgaattgtccatggatgagatcaaccacttgttggttgatattttcgatgctggtactgataccactgcttctactttggaatgggctatgtctgaattgatcaagaacccacatattatgtccaaggctcaagctgaagttagaagggctactgtttctcatggtggtgctactgttgctgctgttcaagaatctgatatttccaacttgccttacatccagtccatcatcaaagaaactttgagattgcatccaccaaccgtttttttgttgccaagaaaagctgatgttgacgttcagttgtacggttatgttgttccaaagaacgctcaagttttggttaacttgtgggcaattggtagagatccaaatgtttggccagatccagaagtttttagaccagaaaggtttatggattgcggtgttgatgttaagggtagagactttgaattattgccatttggtgccggtagaagaatttgtcctggtttgtctttggcttacaggatgttgaatctgatgttggctaatctggttcactctttcgattggaaattgccagattccggtaatggttttggttctgatcctaatggtttggacatggacgaaaagtttggtatcaccttgcaaaaagtcgaaccattgaaggttattccaacgccaagatga

SEQ ID NO: 17 - protein, 499 aa, Beta vulgaris
MDNTTLALILSSLFVCFQLIRSFINHTKKSNKLPPGPKRMPIFGNIFDLGEKPHRSFANLAKIHGPLVSLQLGSVTTVVVSSADVAKEMFLKNDQALANRTIPDSVRAGDHDKLSMSWLPVSAKWRNLRKISAVQLLSTQRLDASQAHRQSKVQQLLEYVHDCSKKGQPVDIGRAAFTTSLNLLSNTFFSVELASHESSASQEFKQLMWNIMEEIGRPNYADFFPILGYLDPFGIRRRLAGYFDQLIAVFQDIIGERQKIRSANLSGGKQTNDILDTLLNLYDEKELSMGEINHLLVDIFDAGTDTTASTLEWAMAELVKNPYMMVKVQDEIEKAIGKGCSMVQESDISKLPYLQAIIKETLRLHPPTVFLLPRKADADVELYGYIVPKNAQVLVNLWAIGRDPKVWKNPEVFSPERFLESNIDYKGRDFELLPFGAGRRICPGLTLAYRMLNLMMANFLHSYDWKLEDGMHPKDLDMDEKFGITLQKVKPLQVIPVPR

SEQ ID NO: 18 - DNA, 1500 bp, Beta vulgaris
  source 1..1500: mol_type = other DNA
atggacaacactaccttggccttgatcttgtcatctttgttcgtttgcttccagttgatcaggtctttcattaaccataccaagaagtccaacaaattgccaccaggtccaaaaagaatgccaattttcggtaacatcttcgacttgggtgaaaagccacatagatcttttgctaacttggctaagattcacggtccattggtttctttacaattgggttctgttactaccgtcgttgtttcttctgctgatgttgctaaagaaatgttcttgaagaacgatcaagctttggccaacagaactattccagattctgttagagctggtgatcacgataagttgtctatgtcttggttgccagtttctgctaaatggcgtaacttgagaaagatttctgctgtccaactgttgtctacccaaagattggatgcttctcaagctcatagacaatctaaggttcaacagttgttggaatacgttcacgattgctctaaaaagggtcaaccagttgatattggtagagctgcttttactacctccttgaacttgttgtctaacaccttcttctctgttgaattggcctctcatgaatcttcagcttcccaagaattcaagcaattgatgtggaacatcatggaagaaatcggtagaccaaattacgccgattttttcccaattttgggttacttggatccattcggtatcagaagaagattggctggttacttcgaccaattgattgctgttttccaagacatcattggtgagagacaaaaaatcagatccgctaatttgtctggtggtaagcaaactaacgatatcttggataccctgctgaacttgtacgacgaaaaagaattatccatgggtgagatcaaccacttgttggttgatatttttgatgccggtactgataccactgcttctactttggaatgggctatggctgaattggttaagaacccatatatgatggttaaggtccaggacgaaattgaaaaggctattggtaaaggttgctccatggttcaagaatccgatatttctaagttgccatacttgcaggccatcatcaaagaaactttgagattgcatccaccaaccgtttttttgttgccaagaaaagctgatgcagatgttgagttgtatggttacatcgttccaaagaatgctcaagtcttggttaacttgtgggctataggtagagatccaaaggtttggaaaaacccagaagttttctcaccagaaaggttcttggaatccaacattgattacaagggtagagactttgagttgttgccatttggtgctggtagaagaatttgtccaggtttgactttggcttacaggatgttgaacttaatgatggccaacttcttgcactcttacgattggaaattggaagatggtatgcaccctaaggatttggatatggacgaaaagtttggtatcaccttgcaaaaggttaagccattgcaagttattccagtgccaagatga

SEQ ID NO: 19 - protein, 500 aa, Beta vulgaris
MDNTTLALILSSLFVCFQLIRSFINHAKKSNKLPPGPKRMPIFGNIFDLGEKPHRSFANLAKIHGPLVSLQLGSVTTVVVSSADVAKEMFLKNDQALANRTIPDSVRAGDHDKLSMSWLPVSAKWRNLRKISAVQLLSTQRLDASQAHRQSKVQQLLEYVHDCSKKGQPVDIGRAAFTTSLNLLSNTFFSVELASHESSASQEFKQLMWNIMEEIGRPNYADFFPILGYLDPFGIRRRLAGYFDQLIAVFQDIIGERQKIRSANLSGGKQTTNDILDTLLNLYDEKELSMGEINHLLVDIFDAGTDTTASTLEWAMAELVKNPDMMVKVQDEIEQAIGKGCSMVQESDISKLPYLQAIIKETLRLHPPTVFLLPRKADADVELYGYVVPKNAQVLVNLWAIGRDPKVWKNPEVFSPERFLESNIDYKGRDFELLPFGAGRRICPGLTLAYRMLNLMMANFLHSYDWKLEDGMHPKDLDMDEKFGITLQKVKPLQVIPVPR

SEQ ID NO: 20 - DNA, 1503 bp, Beta vulgaris
  source 1..1503: mol_type = other DNA
atggacaacactaccttggccttgatcttgtcatctttgttcgtttgcttccagttgatcaggtcctttattaaccatgccaagaagtctaacaaattgccaccaggtccaaagagaatgccaatttttggtaacatcttcgacttgggtgaaaagccacatagatcttttgctaacttggctaagattcacggtccattggtttctttacaattgggttctgttactaccgtcgttgtttcttctgctgatgttgctaaagaaatgttcttgaagaacgatcaagctttggccaacagaactattccagattctgttagagctggtgatcacgataagttgtctatgtcttggttgccagtttctgctaaatggcgtaacttgagaaagatttctgctgtccaactgttgtctacccaaagattggatgcttctcaagctcatagacaatctaaggttcaacagttgttggaatacgttcacgattgctctaaaaagggtcaaccagttgatattggtagagctgcttttactacctccttgaacttgttgtctaacaccttcttctctgttgaattggcctctcatgaatcttcagcttcccaagaattcaagcaattgatgtggaacatcatggaagaaatcggtagaccaaattacgccgattttttcccaattttgggttacttggatccattcggtatcagaagaagattggctggttacttcgaccaattgattgctgttttccaagacatcattggtgagagacaaaaaatcagatccgctaatttgtctggtggtaagcaaactaccaacgatattttggataccctgctgaacttgtacgacgagaaagaattatctatgggtgagatcaaccacttgttggttgatatttttgatgccggtactgataccactgcttctactttggaatgggctatggctgaattggttaagaatccagatatgatggttaaggtccaggacgaaattgaacaagctattggtaaaggttgctccatggttcaagaatctgatatctctaagttgccatacttgcaggccattatcaaagaaaccttgagattgcatccaccaaccgtttttttgttgccaagaaaagctgatgcagatgttgagttgtatggttacgttgttccaaagaatgctcaagtcttggttaacttgtgggctataggtagagatccaaaggtttggaaaaacccagaagttttctcaccagaaaggttcttggaatccaacattgattacaagggtagagactttgagttgttgccatttggtgctggtagaagaatttgtccaggtttgactttggcttacaggatgttgaatttgatgatggccaacttcttgcactcttacgattggaaattggaagatggtatgcaccctaaggatttggatatggacgaaaagtttggtatcaccttgcaaaaggttaagccattgcaagttattccagtgccaagatga

SEQ ID NO: 21 - protein, 499 aa, Beta vulgaris
MDNTTLALILSSLFVCFQLIRSFINHAKKSNKLPPGPKRMPIFGNIFDLGEKPHRSFANLAKIHGPLVSLQLGSVTTVVVSSADVAKEMFLKNDQALANRTIPDSVRAGDHDKLSMSWLPVSAKWRNLRKISAVQLLSTQRLDASQAHRQSKVQQLLEYVHDCSKKGQPVDIGRAAFTTSLNLLSNTFFSVELASHESSASQEFKQLMWNIMEEIGRPNYADFFPILGYLDPFGIRRRLAGYFDQLIAVFQDIIGERQKIRSANLSGGKQTNDILDTLLNLYDEKELSMGEINHLLVDIFDAGTDTTASTLEWAMAELVKNPDMMVKVQDEIEQAIGKGCSMVQESDISKLPYLQAIIKETLRLHPPTVFLLPRKADADVELYGYVVPKNAQVLVNLWAIGRDPKVWKNPEVFSPERFLESNIDYKGRDFELLPFGAGRRICPGLTLAYRMLNLMMANFLHSYDWKLEDGMHPKDLDMDEKFGITLQKVKPLQVIPVPR

SEQ ID NO: 22 - DNA, 1500 bp, Beta vulgaris
  source 1..1500: mol_type = other DNA
atggacaacactaccttggccttgatcttgtcatctttgttcgtttgcttccagttgatcaggtcctttattaaccatgccaagaagtctaacaaattgccaccaggtccaaagagaatgccaatttttggtaacatcttcgacttgggtgaaaagccacatagatcttttgctaacttggctaagattcacggtccattggtttctttacaattgggttctgttactaccgtcgttgtttcttctgctgatgttgctaaagaaatgttcttgaagaacgatcaagctttggccaacagaactattccagattctgttagagctggtgatcacgataagttgtctatgtcttggttgccagtttctgctaaatggcgtaacttgagaaagatttctgctgtccaactgttgtctacccaaagattggatgcttctcaagctcatagacaatctaaggttcaacagttgttggaatacgttcacgattgctctaaaaagggtcaaccagttgatattggtagagctgcttttactacctccttgaacttgttgtctaacaccttcttctctgttgaattggcctctcatgaatcttcagcttcccaagaattcaagcaattgatgtggaacatcatggaagaaatcggtagaccaaattacgccgattttttcccaattttgggttacttggatccattcggtatcagaagaagattggctggttacttcgaccaattgattgctgttttccaagacatcattggtgagagacaaaaaatcagatccgctaatttgtctggtggtaagcaaactaacgatatcttggataccctgctgaacttgtacgacgaaaaagaattatccatgggtgagatcaaccacttgttggttgatatttttgatgccggtactgataccactgcttctactttggaatgggctatggctgaattggttaagaatccagatatgatggttaaggtccaggacgaaattgaacaagctattggtaaaggttgctccatggttcaagaatctgatatctctaagttgccatacttgcaggccattatcaaagaaaccttgagattgcatccaccaaccgtttttttgttgccaagaaaagctgatgcagatgttgagttgtatggttacgttgttccaaagaatgctcaagtcttggttaacttgtgggctataggtagagatccaaaggtttggaaaaacccagaagttttctcaccagaaaggttcttggaatccaacattgattacaagggtagagactttgagttgttgccatttggtgctggtagaagaatttgtccaggtttgactttggcttacaggatgttgaatttgatgatggccaacttcttgcactcttacgattggaaattggaagatggtatgcaccctaaggatttggatatggacgaaaagtttggtatcaccttgcaaaaggttaagccattgcaagttattccagtgccaagatga

SEQ ID NO: 23 - protein, 495 aa, Cleretum bellidiforme
MDYTTLVMILSIVFFCYNLFNLLFTRKNTKLPPGPKTIPIFGNIFELGKKPHQSFANLAKIHGPLMSLKLGSVTTIVVSSAEVAREMFLKNDQLLSNRTVPNSVTAGDHHKTTMSWLPVSQKWRNFRKITAVHLLSPQRLDSCQALRQAKVKQLFNYIHECAQKGEAVDIGKAAFTTSLNLLSNLFFSVELANHKSSSSQEFKQLIWNIMEDIGKPNYADYFPVLKYVDPSGIRRRLASNFNKLIDVFQGFIRLRMSTNSSCGATNPNDVLDVLLNLYKGDDLNMDEINHLLVDIFDAGTDTTSSTFEWAMAELVKNPKMMKKAQAEIQQVLGKDSIIRESDIPNMPYLQAIIKETLRLHPPTVFLLPRKADADVELYGYVVPKNAQILVNLWALGRDPLVWKSPNVFKPERFLGSEIDFKGRDFGLLPFGAGRRICPGMNLAYRMLTLMLATLLQSFDWKVADGTNPQDMDMDEKFGIALQKTTPLQIIPVYKY

SEQ ID NO: 24 - DNA, 1488 bp, Cleretum bellidiforme
  source 1..1488: mol_type = other DNA
atggactacaccaccttggtcatgattctgtctattgtgttcttctgctacaacctgttcaacttgttgttcactagaaagaacactaagttgccaccaggtccaaagactattccaattttcggtaacatcttcgagttgggtaaaaagccacatcaatcttttgctaacttggctaagattcacggtccattgatgtctttgaaattgggttctgttacgaccatcgttgtttcatctgctgaagttgctagagaaatgttcttgaagaacgaccagttgttgtccaatagaactgttccaaattctgttaccgctggtgatcatcataagactactatgtcttggttgccagtttctcaaaagtggcgtaacttcagaaagattaccgctgttcatttgttgtccccacaaagattggattcttgtcaagctttgagacaagctaaggttaagcagttgttcaactacatccatgaatgtgctcaaaagggtgaagctgttgatattggtaaagctgctttcaccacttccttgaacttgttgagcaatttgttcttctccgttgaattggccaaccacaaatcttcatcttcccaagaattcaagcagctgatctggaacattatggaagatatcggtaagccaaactacgctgattactttccagttttgaagtacgttgatccatccggtattagaagaagattggcttctaacttcaacaagctgatcgatgttttccagggtttcatcagattgagaatgtctaccaattcttcttgcggtgctactaatccaaatgatgttttggatgtcctgctgaacttgtacaaaggtgatgatttgaacatggacgagatcaaccatttgttggttgatattttcgatgccggtactgataccacttcttctacttttgaatgggctatggctgaattggttaagaacccaaaaatgatgaagaaggcccaagccgaaatccaacaagttttgggtaaagactccatcatcagagaatccgatattccaaatatgccatacttgcaggccatcatcaaagagactttgagattgcatccaccaaccgtttttttgttgccaagaaaagctgatgctgatgttgagttgtatggttacgttgttccaaagaacgcccaaatcttggttaatttgtgggctttgggtagagatcctttggtttggaaatctcctaatgtgttcaagccagaaaggttcttgggttccgaaattgatttcaagggaagagattttggcttgttgccatttggtgctggtagaagaatttgtccaggtatgaatttggcctacagaatgttgactttgatgttggctactctgttgcaatctttcgattggaaagttgctgatggtacaaacccacaagatatggatatggacgaaaagtttggtatcgccttgcaaaaaactaccccattgcaaattatccccgtctacaagtactga

SEQ ID NO: 25 - protein, 494 aa, Ercilla volubilis
MDHTTLAMILSAIFLLYNLAKAIFSHSNTKLPPGPKPVPIFGNIFELGEKPHRSFANLAKIHGPLITLKLGSVTTIVVSSAEVAKEMFLKNDLPLANRNVPNSVTAGDHHKLTMSWLPVSPKWKTFRKITAVHLLSPQRLDSCQALRHTKVKQLHQYVQECAKRGEPVDIGKAAFTTSLNLLSNLFFSVELANHTSSSSQEFKELIWEIMEDIGKPNYADYFPILKCVDPWGIRRRLASNFDKLIEVFQGFIRKRLSTGSFSAITPNDVLDVLLNLLKEKELNMGEINHLLVDIFDAGTDTTSSTFEWAMAELVRNQEMMKKAQDEIEQVLGKDAIIQESDIPKMPYLQAIIKETLRLHPPTVFLLPRKATSNVELYGYVVPKNAQILVNLWAIGRDPKVWDNPNMFSPERFLNSEIDVKGRDFGLLPFGAGRRICPGMNLAYRMLTLMLATLLQSFDWKLGDGVNPKDLDMEEKFGIALQKTKPLQVIPVLKY

SEQ ID NO: 26 - DNA, 1485 bp, Ercilla volubilis
  source 1..1485: mol_type = other DNA
atggatcataccaccttggccatgattttgtctgctattttcctgttgtacaatttggccaaggccatcttttctcattctaacacaaaattgccaccaggtccaaaaccagttccaatttttggtaacatcttcgagttgggtgaaaagccacatagatcttttgctaacttggctaagattcacggtccattgattactttgaagttgggttctgttacgaccatcgttgtttcatctgctgaagttgctaaagaaatgttcctgaagaacgatttgccattggctaatagaaacgttccaaactctgttactgctggtgatcatcataagttgactatgtcttggttgccagtttctccaaagtggaaaaccttcagaaagattaccgctgttcatttgttgtccccacaaagattggattcttgtcaagctttgagacacaccaaggttaagcaattgcatcaatacgttcaagaatgcgctaaaagaggtgaaccagttgatattggtaaggctgcttttactacctccttgaacttgttgtctaacctgttcttctctgttgaattggctaaccatacctcctcatcttcccaagaattcaaagaattgatctgggagatcatggaagatatcggtaagccaaattacgctgattacttcccaattttgaagtgcgttgatccatggggtattagaagaagattggcttctaacttcgacaagttgatcgaggtttttcagggtttcatcagaaagagattgtctaccggttccttttctgctattactccaaatgatgttctggacgtgttgctgaatctgttgaaagaaaaagaactgaacatgggcgaaatcaaccacttgttggttgatatttttgatgccggtactgataccacttcttctacatttgaatgggctatggctgagttggtcagaaatcaagaaatgatgaagaaggcccaagacgaaatcgaacaagttttgggtaaagatgccatcatccaagaatccgatattccaaaaatgccatacttgcaggccattatcaaagaaaccttgagattgcatccaccaaccgtttttttgttgccaagaaaggctacttctaacgttgagttgtatggttacgttgttccaaagaacgcccaaatcttggttaatttgtgggctattggtagagatccaaaggtttgggataatccaaacatgttctctccagaaaggttcttgaactccgaaattgatgttaagggtagagactttggtttgttgccttttggtgctggtagaagaatttgtccaggtatgaatttggcctacagaatgttgactttgatgttggctactctgttgcaatctttcgattggaaattaggtgatggtgttaacccaaaggatttggacatggaagaaaagtttggtatcgccttgcaaaagactaagccattgcaagttattcccgtcttgaagtactga

SEQ ID NO: 27 - protein, 497 aa, Phytolacca dioica
MDHTTLAMILSAIFLLYNLVKLAIFSQSNTKLPPGPKPLPIFGNIFELGDKPHRSFANLAKIHGPLITLKLGSITTIVVSSAEVAKEMFLKNDQPLANRNVPNSVTAGDHHKLTMSWLPVSPKWKTFRKITAVHLLSPQRLDACQALRHTNVKQLHEYVQECAQRGQPVDIGKAAFTTSLNLLSNLFFSVELANHTSSNSQEFKELIWDIMEDIGKPNYADYFPVLKCVDPWGIRRRLESNFDKLIEVFQGFIRKRLSTGSFSASETTPNDVLDVLLNLFKEKELNMGEINHLLVDIFDAGTDTTSSTFEWAMAELVRNPDMMKKAQDEIEQVLGRDAIIQESDIPKMPYLQAIIKETLRLHPPTVFLLPRKATTNVDLYGYVVPKNAQILVNLWAIGRDPTVWDNPNMFSPERFLNSDIDVKGRDFGLLPFGAGRRICPGMNLAYRMLTLMLATLLQSFNWKLGDGVNPKDLDMDEKFGIALQKTKPLQVIPVFKY

SEQ ID NO: 28 - DNA, 1494 bp, Phytolacca dioica
  source 1..1494: mol_type = other DNA
atggatcataccaccttggccatgattttgtctgctattttcctgctgtacaacttggttaagttggccattttctctcagtctaacacaaaattgccaccaggtccaaaaccattgccaatttttggtaacatcttcgagttgggtgataagccacatagatcttttgctaacttggctaagattcacggtccattgattactttgaagttgggttctatcacgaccatcgttgtttcatctgctgaagttgctaaagaaatgttcttgaagaacgatcaaccactggctaatagaaacgttccaaattctgttactgctggtgatcatcataagttgactatgtcttggttgccagtttctccaaagtggaaaaccttcagaaagattaccgctgttcatttgttgtccccacaaagattggatgcttgtcaagctttgagacataccaacgttaagcaattgcacgaatacgttcaagaatgtgctcaaagaggtcaaccagttgatattggtaaagctgctttcaccacttccttgaacttgttgtctaacttgttcttctccgttgaattggctaaccatacctcttctaactcccaagaattcaaagaattgatctgggacatcatggaagatatcggtaagccaaattacgctgattacttcccagttttgaagtgtgttgatccatggggtattagaagaaggttggaatctaacttcgacaagttgatcgaggtctttcaaggtttcatcagaaagagattgtctaccggttctttctctgcttctgaaactactccaaatgatgttttggacgtcctgctgaatctgttcaaagaaaaagaactgaacatgggcgagatcaaccatttgttggttgatatttttgatgccggtactgataccacttcttctacttttgaatgggctatggctgaattggttagaaacccagatatgatgaagaaggcccaagacgaaattgaacaagttttgggtagagatgccatcatccaagaatctgatattccaaagatgccatacttgcaggccattatcaaagaaactttgagattgcatccaccaaccgtttttttgttgccaagaaaggctactaccaatgttgacttgtatggttacgttgttccaaagaacgcccaaatcttggttaatttgtgggctattggtagagatccaactgtttgggataatccaaatatgttctctccagagaggttcttgaactccgatattgatgtaaagggtagagactttggtttgttgccttttggtgctggtagaagaatttgtccaggtatgaatttggcctacagaatgttgacattgatgttggctactctgttgcaatctttcaactggaaattaggtgatggtgttaacccaaaggatttggatatggacgaaaagtttggtatcgccttgcaaaaaactaagccattgcaagtcattcccgtgttcaagtactaa

SEQ ID NO: 29 - protein, 503 aa, Acleisanthes obtuse
MENTTLGVILAIIFLTFHVMKLLLSSNKAKLPPGPKPLPIIGNILELGDKPHRSFANLAKIHGPLITLKLGSVTTIVVSSSEVAKEMFLKNDQALANRTIPDSVRAGNHDKLSMSWLPVSPKWRNLRKISAVQLLSSQRLDASQAHRQVKVEQLIEYVKECSKIGQCVDIGRVAFTTSLNLLSNTFFSKELASFDSNNAQEFKQLMWCIMEEIGRPNYADYFPILGYVDPFGVRRRLSRYFDQLIEVFQQIIRERLSKDNKIVDNNNDVLATLLHLYKQNELSMDEINHLLVDIFDAGTDTTASTLEWAMSELIKNPHIMIKAQAEVRQATSSRGGATVVDVQESDINNLPYIQAIIKESLRLHPPTVFLLPRKADVDVQLYGYLVPKNAQVLVNLWAIGRDPNVWPDPEVFRPERFLDCEVDVKGRDFELLPFGAGRRICPGLSLAYRMLNLMLANLVHSFDWKLPNVENKSGSDPDELDMDEKFGITLQKVKPLQIIPMSR

SEQ ID NO: 30 - DNA, 1512 bp, Acleisanthes obtuse
  source 1..1512: mol_type = other DNA
atggaaaacaccaccttgggtgttattctggccattattttcttgaccttccacgtcatgaagctgttgttgtcatctaacaaagctaaattgccaccaggtccaaaaccattgccaattattggtaacatcttggagttgggtgataagccacatagatcttttgctaacttggctaagattcacggtccattgattactttgaagttgggttctgttacgactatcgttgtctcttcatctgaagttgccaaagaaatgttcttgaagaacgatcaagctttggccaacagaactattccagattctgttagagctggtaaccacgataagttgtctatgtcttggttgccagtttctccaaaatggcgtaacttgagaaagatttctgccgttcaactgctgtcatctcaaagattggatgcttctcaagctcacagacaagttaaggttgaacagttgatcgaatacgtcaaagagtgctctaagattggtcaatgcgttgatattggtagagttgctttcaccacttccttgaacttgttgtctaacaccttcttcagcaaagaattggcctctttcgattctaacaacgcccaagaattcaagcaattgatgtggtgcattatggaagaaatcggtagaccaaattacgccgattactttccaattttgggttacgttgatccattcggtgttagaagaagattgtccagatacttcgaccagttgattgaagtgttccaacagatcattagagagaggttgtctaaggataacaagatcgtcgataacaacaacgatgttttggctactttgctgcacttgtacaaacagaacgaattgtctatggacgagatcaaccatttgttggttgatattttcgatgccggtactgatacaactgcttctactttggaatgggctatgtccgaattgattaagaacccacatattatgattaaggcccaagccgaagttagacaagctacttcttctagaggtggtgctactgttgttgatgttcaagaatccgatatcaacaacttgccttacattcaggccatcatcaaagaatccttgagattgcatccaccaaccgtttttttgttgccaagaaaagctgatgttgacgttcagttgtacggttatttggttccaaagaatgcccaagttttggttaacttgtgggctataggtagagatccaaatgtttggccagatccagaagtttttagaccagaaagattcttggattgcgaagttgatgttaagggtagagattttgagttgttgccatttggtgctggtagaagaatttgtcctggtttgtctttggcttacaggatgttgaatctgatgttggctaatctggttcattccttcgattggaaattgccaaacgtcgaaaacaagtctggttctgatccagatgaattggatatggacgaaaagttcggtatcaccttgcaaaaagttaagccattgcaaatcatccccatgtccagatga

SEQ ID NO: 31 - protein, 503 aa, Mirabilis multiflora
MENTMLGVILATIFLTFHIMKMFLSPSKAKLPPGPRPLPIIGNILELGDKPHRSFANLAKIHGPLVTLKLGSVTTIVVSSSEVAKEMFLKNDQPLANRTIPDSVRAGNHDKLSMSWLPVSPKWRNLRKISAVQLLSTQRLDASQAHRQAKIQQLIEYIKKCSKIGQYVDIGQVAFTTSLNLLSNTFFSKELASFDSNNAQEFKQLMWCIMEEIGRPNYADYFPILGYVDPFGARRRLSRYFDQLIEVFQVIIRERLTHDNNIVGNNNDILATLLDLYKQNELSMDEINHLLVDIFDAGTDTTASTLEWAMSELIKNPHIMVKAQEEVRQATMSRGGATVAEIQESDINNLPYIQSIVKETLRLHPPTVFLLPRKAEVDVQLFGYVVPKNAQVLVNLWAIGRDPNVWPDPEVFKPERFMDCEIDVKGRDFELLPFGAGRRICPGLSLAYRMLNLMLANMVHSFEWKLPGVENGFGSEMDSLDMDEKFGITLQKVQPLKVIPVSR

SEQ ID NO: 32 - DNA, 1512 bp, Mirabilis multiflora
  source 1..1512: mol_type = other DNA
atggaaaacaccatgttgggtgttattctggctactattttcttgaccttccacatcatgaagatgttcttgtctccatctaaagctaaattgccaccaggtccaagaccattgccaattattggtaacattttggagttgggtgataagccacatagatcttttgctaacttggctaagattcacggtccattggttactttgaaattgggttctgttacgactatcgtcgtgtcatcttctgaagttgctaaagaaatgttcctgaagaacgatcaaccattggccaacagaactattccagattctgttagagctggtaaccacgataagttgtctatgtcttggttgccagtttcaccaaaatggcgtaacttgagaaagatttctgctgtccaactgttgtctacccaaagattggatgcttctcaagctcatagacaagccaagattcaacaattgatcgagtacatcaagaagtgctccaagattggtcaatacgttgatattggtcaagttgccttcaccacttctttgaacttgttgtctaacaccttcttcagcaaagaattggcctctttcgattctaacaacgcccaagagtttaagcaattgatgtggtgcattatggaagaaatcggtagaccaaattacgccgattactttcctattttgggttacgttgatccattcggtgctagaagaagattgtctagatacttcgaccagttgatcgaagttttccaagtcatcattagagaaaggttgacccacgataacaacatcgttggtaacaacaacgatattttggctaccttgctggacttgtacaaacagaatgaattgtccatggatgagatcaaccacttgttggttgatattttcgatgctggtactgataccactgcttctactttggaatgggctatgtctgaattgatcaagaacccacatattatggtcaaggcccaagaagaagttagacaagctactatgtctagaggtggtgctactgttgctgaaattcaagaatccgatatcaacaacttgccctacattcagtccattgtcaaagaaaccttgagattgcatccaccaactgtttttttgttgccaagaaaggctgaagttgatgttcagttgttcggttatgttgttccaaagaacgctcaagttttggttaacttgtgggctattggtagagatccaaatgtttggccagatccagaagtttttaagccagaaagattcatggattgcgaaatcgatgttaagggtagagattttgagttgttgccatttggtgctggtagaagaatttgtccaggtttgtctttggcttacaggatgttgaatttgatgttggctaacatggtccattccttcgaatggaaattgccaggtgttgaaaatggtttcggttccgaaatggattctttggatatggacgaaaagttcggtatcaccttgcaaaaagttcagccattgaaggttatcccagtctctagataa

SEQ ID NO: 33 - protein, 434 aa, Acleisanthes obtuse
IHGPLITLKLGSVTTIVVSSAKVAEEMFLKNDLPLANRNVPNSVTAGDHHKLTMSWLPVSPKWKTFRKITAVHLLSPQRLDACQALRHAKVKQLHEYVQDCAKKGQAVDIGKAAFTTSLNLLSNLFFSVELAQHTSSSSQHFKELIWDIMEDIGKPNYADYFPALKCVDPWGIRRRLAANFERLIDVFQGFIRQRLSINSSTVTSASDVLDVLLNLYKEKELNMGEINHLLVDIFDAGTDTTSSTFEWAMAELVRHPEIMKKAQDEIEQVLGKDAIIQEADIPKMPYLQAIIKETLRLHPPTVFLLPRKATTNVELYGYVVPKNAQILVNLWAIGRDPLVWDNPNKFSPERFLNSDIDVKGRDFGLLPFGAGRRICPGMNLAYRILTLMLATLLQSFEWMVENGENPEDLDMDEKFGIALQKTKPLEIIPVIKH

SEQ ID NO: 34 - DNA, 1485 bp, Acleisanthes obtuse
  source 1..1485: mol_type = other DNA
atggaccaaactaccttggccatgttgttgtctgcattatacctgctgtacaacctgtacaaggttatcttcactcagtccaattctaaattgccaccaggtccaaaaccattgccaattttgggtaacattttcgaggttggtaacaagccacatagatcttttgctaacttggctaagattcacggtccattgattactttgaagttgggttctgttacgaccatcgttgtttcttcagctaaagttgccgaagagatgttcttgaagaatgatttgccattggccaacagaaacgttccaaattctgttactgctggtgatcatcataagttgactatgtcttggttgccagtttctccaaagtggaaaaccttcagaaagattaccgctgttcatttgttgtccccacaaagattggatgcttgtcaagctttgagacatgctaaggttaagcaattgcacgaatacgttcaagattgtgctaaaaagggtcaagccgttgatattggtaaagctgcttttactacctccttgaacttgctgtctaacttgttcttctctgttgaattggctcaacacacctcttcatcttcccaacatttcaaagaattgatctgggacatcatggaagatatcggtaagccaaattacgctgattatttcccagctttgaagtgtgttgatccatggggtattagaagaagattggctgctaatttcgaaaggttgatcgatgttttccagggtttcattagacagaggttgtccattaactcttctactgttacttctgcctctgatgttttggatgtcttgctgaacttgtacaaagaaaaagaactgaacatgggcgagatcaaccatttgttggttgatatttttgatgccggtactgataccacttcttctacatttgaatgggctatggctgaattggttagacatccagaaattatgaagaaggcccaagacgaaatcgaacaagttttaggtaaggatgccattatccaagaagccgatattccaaaaatgccatacttgcaagccatcatcaaagaaaccttgagattgcatccaccaaccgtttttttgttgccaagaaaggctactaccaacgtcgaattatatggttacgttgttccaaagaacgcccaaatcttggttaatttgtgggctattggtagagatccattggtttgggataatccaaacaagttctctccagaaaggttcttgaactccgatattgatgttaagggtagagactttggtttgttgccttttggtgctggtagaagaatttgtccaggtatgaatttggcctacagaatcttgactttgatgttggcaactctgttgcaatctttcgaatggatggttgaaaatggtgaaaaccctgaagatttggacatggacgaaaaatttggtatcgccttgcaaaagactaagccattggaaattatcccagtcatcaagcactga

SEQ ID NO: 35 - protein, 495 aa, Abronia nealleyi
MDYLTIVMLVSIVFFLYSLLKMMFITHSNAQLPPGPKPMPLIGNILEIGEKPHRSFANLAKSHGPLMSLRLGRVTTIVVSSAEVAKEMFLKNDQSLCDRCVPNSVTAGDHHKLTMSWLPVSPKWKNFRKITAVHLLSPQRLDACHALRHAKVKQLYEYIQECAIKGEAVDIGKAAFTTSLNLLSNLFFSVELAHHTSNTSQEFKQLIWDIMEDIGKPNYADYFPLLKYVDPLGIRHRLAANFDKLIDVFQSFIRKRLLSSYSSATSLNDVLDVLLKLYKEKALNMGEINHLLVDIFDAGTDTTSNTFEWAMAELIRHPIMMRRAQTEIALVLGKDPTIKEADVANMPYLQAIIKETLRLHPPTVFLLPRKAITDVKLYGYVVPKNSQILVNLWAIGRDPKVWNNPNEFMPDRFLNSDIDVKGRDFGLLPFGAGRRICPGMNLAYRMLTLMLATLLQSFDWKLPHGITPKDLDMDEKFGISLQKTKPLQLIPILKY

SEQ ID NO: 36 - DNA, 1488 bp, Abronia nealleyi
  source 1..1488: mol_type = other DNA
atggactacttgaccatcgtcatgttggtgtctatcgttttcttcctgtactccttgttgaagatgatgttcatcactcattccaacgctcaattgccaccaggtccaaaacctatgccattgattggtaacattttggagattggtgaaaagccacatagatcctttgctaacttggctaaatctcatggtccattgatgtctttgagattgggtagagttactaccatcgttgtttcatctgctgaagttgccaaagaaatgttcttgaagaacgaccaatctttgtgcgatagatgtgttccaaattctgttactgctggtgatcatcataagttgactatgtcttggttgccagtttcaccaaagtggaagaacttcagaaagattaccgctgttcatttgttgtctccacaaagactagatgcttgtcatgctttgagacatgctaaagttaagcagttgtacgagtacattcaagaatgcgctattaagggtgaagccgttgatattggtaaagctgcttttactacctccttgaacttgctgtctaacttgttcttctctgttgaattggctcatcatacctctaacacctctcaagaattcaagcaattgatctgggacatcatggaagatatcggtaagccaaattacgctgattacttcccactgttgaaatacgttgatccattgggtatcagacatagattggctgctaatttcgataagctgatcgacgttttccagtcctttattagaaagaggctgctgtcctcttattcttctgctacttctttgaacgatgtcttggacgttttgttgaagctgtacaaagaaaaggctttgaacatgggtgaaatcaaccacttgttggttgatattttcgatgctggtactgataccacctctaatacttttgaatgggctatggccgaattgatcagacatccaattatgatgagaagggcccaaactgaaattgctttggttttgggtaaagacccaaccatcaaagaagctgacgttgctaatatgccatacttgcaagccattatcaaagaaaccttgagattgcatccaccaaccgtttttttgttgccaagaaaggctattaccgacgttaagttgtatggttacgttgtcccaaagaactcccaaatcttggttaatttgtgggccattggtagagatccaaaggtttggaacaatccaaacgaattcatgccagacagattcttgaactccgatattgatgttaagggtagagactttggtttgttgccttttggtgctggtagaagaatttgtccaggtatgaatttggcctacagaatgttgactttgatgttggctactctgttgcaatctttcgattggaaattgccacatggtattacccctaaggatttggatatggacgaaaagttcggtatctccttgcaaaaaactaagccattgcagttgatccccatcttgaagtactaa

SEQ ID NO: 37 - protein, 496 aa, Phytolacca americana
MDHTTLAMILSVIFLLYNLVKAIFSQSNTKLPPGPKPVPIFGNIFELGDKPHRSFANLAKIHGPLITLKLGSVTTIVVSSAEVAKEMFLTNDQLLANRNVPNSVTAGDHHKLTMSWLPVSPKWKTFRKITAVHLLSPQRLDACQALRHTKVKQLYEYVQECAKRGEAVDIGKAAFTTSLNLLSNLFFSVELANHTSSSSQEFKELIWDIMEDIGKPNYADYFPVLKCVDPWGIRRRLESNFDKLIEVFQSFIRKRLSTEPFSASAKTPNDVLDVLLNLLKEEELNMGEINHLLVDIFDAGTDTTSSTFEWAMAELVRNPEMMKKAQDEIEQVLGKDAIIQESDIPKMPYLQAIIKETLRLHPPTVFLLPRKASSNVELYGYVVPKNAQILVNLWAIGRDPTVWDNPNMFSPERFLNSDIDVKGRDFGLLPFGAGRRICPGMNLAYRMLTLMLATLLQSFDWKLGDGVNPKDLDMDEKFGIALQKTKPLQVIPVLKY

SEQ ID NO: 38 - DNA, 1491 bp, Phytolacca americana
  source 1..1491: mol_type = other DNA
atggatcataccaccttggccatgatcttgtctgttattttcctgctgtacaacttggttaaggccatcttttctcaatccaacacaaaattgccaccaggtccaaaaccagttccaatttttggtaacatcttcgagttgggtgataagccacatagatcttttgctaacttggctaagattcacggtccattgattactttgaagttgggttctgttacgaccatcgttgtttcatctgctgaagttgctaaagaaatgttcttgaccaacgatcagttgctggctaatagaaacgttccaaattctgttactgctggtgatcatcataagttgactatgtcttggttgccagtttctccaaagtggaaaaccttcagaaagattaccgctgttcatttgttgtccccacaaagattggatgcttgtcaagctttgagacataccaaagttaagcagttgtacgaatacgttcaagaatgtgctaaaagaggtgaagccgttgatattggtaaagctgcttttactacctccttgaacttgctgtctaacttgttcttctctgttgaattggctaaccacacctcttcatcttcccaagaattcaaagaattgatctgggacatcatggaagatatcggtaagccaaattacgctgattacttcccagttttgaagtgtgttgatccatggggtattagaagaaggttggaatctaacttcgacaagttgatcgaggtgttccagtctttcattagaaagagattgtctaccgaaccattttctgcctctgctaaaactccaaatgatgttttggacgtgctgctgaacttgttgaaagaagaggaattgaacatgggtgagatcaaccatttgttggttgatattttcgatgccggtactgataccacttcttctacatttgaatgggctatggctgaattggttagaaacccagaaatgatgaagaaggcccaagacgaaattgaacaagttttgggtaaagacgccatcatccaagaatctgatattccaaaaatgccatacttgcaggccattatcaaagaaaccttgagattgcatccaccaaccgtttttttgttgccaagaaaagcctcttctaacgttgagttgtatggttacgttgttccaaagaacgcccaaatcttggttaatttgtgggctattggtagagatccaactgtttgggataatccaaatatgttctctccagagaggttcttgaactccgatattgatgttaagggtagagactttggtttgttgccttttggtgctggtagaagaatttgtccaggtatgaatttggcctacagaatgttgactttgatgttggctactctgttgcaatctttcgattggaaattaggtgatggtgttaacccaaaggatttggatatggacgaaaagtttggtatcgccttgcaaaaaactaagccattgcaagtcattcccgtcttgaagtactaa

SEQ ID NO: 39 - protein, 499 aa, Chenopodium quinoa
MEHTTLALILSILFICFHLVRSFVSHSTKSNKLPPGPKRMPIFGNILDLGEKPHRSFANLAKIHGPLVSLQLGSITTIIVSSADVAKEMFLKNDQLLANRTIPDSVRAGNHDKLSMSWLPISAKWRNLRKISAVQLLSNQRLDASQAHRQAKVEQLLAYVQDCSKKGQPVDIGRAAFTTSLNLLSNTFFSTELASHESNNSQEFKQLMWNIMEEIGRPNYADYFPILGYVDPFGIRRRLAAYFDKLIAVFQDIICERQKIRSTKVSSEKQTGDILDTLLNLYDENELSMGEINHLLVDIFDAGTDTTASTLEWAMAELVKNPGMMIRVQNEIELAIGKGCSMVQEADISKLPYLQAIIKETLRLHPPTVFLLPRKADIDVELYGYVVPKNAQVLVNLWAIGRDPKVWKNPEIFSPERFLGCDIDFKGRDFELLPFGAGRRICPGLTLAYRMLNLMMANFVHSFDWKLEDGMNPKDLDMDEKFGITLQKVKPLQVIPVHR

SEQ ID NO: 40 - DNA, 1500 bp, Chenopodium quinoa
  source 1..1500: mol_type = other DNA
atggaacataccaccttggccttgatcttgtccattttgttcatttgcttccacttggtcaggtcctttgtttctcattctactaagtctaacaagttgccaccaggtccaaaaagaatgccaattttcggtaacatcttggacttgggtgaaaagccacatagatcttttgctaacttggctaagattcacggtccattggtttctttacaattgggttctatcacgaccatcatcgtttcttcagctgatgttgctaaagaaatgttcttgaagaacgatcagttgttggctaacagaaccattccagattctgttagagctggtaaccatgacaaattgtctatgtcttggttgccaatttctgctaagtggcgtaacttgagaaagatttccgctgtccaactgttgtccaatcaaagattggatgcttctcaagctcatagacaagctaaagttgaacaactgttggcttacgttcaagactgttctaaaaaaggtcaaccagttgatattggtagagctgcttttactacctccttgaacttgttgtctaacaccttcttctctaccgaattggcttctcatgaatccaacaactctcaagaattcaagcagttgatgtggaacatcatggaagaaattggtagaccaaactacgctgattacttcccaattttgggttacgttgatccattcggcattagaagaagattggctgcatacttcgataagttgattgctgttttccaagacatcatctgcgaaagacaaaagatcaggtctacgaaggtttcctctgaaaaacaaaccggtgatatcttggataccctgttgaacttatacgacgaaaacgaattatccatgggtgagatcaaccacttgttggttgatatttttgatgccggtactgataccactgcttctactttggaatgggctatggctgaattggttaagaatccaggtatgatgatcagagtccagaacgaaattgaattggctattggtaagggttgctccatggttcaagaagctgatatttctaagttgccatacttgcaggccatcatcaaagaaactttgagattgcatccaccaaccgtttttttgttgccaagaaaggctgatatcgatgttgagttgtacggttatgttgttccaaagaacgctcaagttttggttaacttgtgggctataggtagagatccaaaggtttggaaaaacccagaaatcttctcaccagaaagattcttgggttgcgatattgatttcaagggtagagattttgagttgttgccatttggtgctggtagaagaatttgtccaggtttgactttggcttacaggatgttgaatctaatgatggccaacttcgttcactctttcgattggaaattggaggatggtatgaaccctaaggatttggatatggacgaaaagttcggtatcaccttgcaaaaagttaagccattgcaagttatcccagtccacagataa

SEQ ID NO: 41 - protein, 494 aa, Mirabilis multiflora
MDQTTLAMLLSALYLLYNLFKVIFTQSNSKLPPGPKPLPILGNIFELGDKPHRSFNNLAKIHGPLITLKLGSVTTIVVSSAKVAEEMFLKNDLPLANRNVPNSVTAGDHHKLTMSWLPVSPKWKTFRKITAVHLLSPQRLDACQALRHAKVKQLYQYVQDCAKKGEAVDIGKAAFTTSLNLLSNLFFSVELAQHTSSSSQHFKELIWDIMEDIGKPNYADYFPALKCVDPWGIRRRLAANFERLIQVFQNFIRQRLSTDPSSVTNASDVLDVLLNLYKEKELNMGEINHLLVDIFDAGTDTTSSTFEWAMAELVRHPEIMKKAQDEIEQVLGKDATIQEADIPKMPYLQAIIKETLRLHPPTVFLLPRKATTNVELYGYVVPKNAQILVNLWAIGRDPLVWDQPNKFSPERFLNSDIDVKGRDFGLLPFGAGRRICPGMNLAYRMLTLMLATLLQSFEWKVQNGEKPEDLDMDEKFGIALQKTKPLEIIPVLKY

SEQ ID NO: 42 - DNA, 1485 bp, Mirabilis multiflora
  source 1..1485: mol_type = other DNA
atggaccaaactaccttggccatgttgttgtctgcattatacctgctgtacaacttgttcaaggttatcttcacccagtccaattctaaattgccaccaggtccaaaaccattgccaattttgggtaacattttcgagttgggtgataagccacataggtcttttaacaacttggctaagattcacggtccattgattactttgaagttgggttctgttacgaccatcgttgtttcttcagctaaagttgccgaagagatgttcttgaagaatgatttgccattggccaacagaaacgttccaaattctgttactgctggtgatcatcataagttgactatgtcttggttgccagtttctccaaagtggaaaaccttcagaaagattaccgctgttcatttgttgtccccacaaagattggatgcttgtcaagctttgagacatgctaaagttaagcagttgtaccaatacgttcaagattgtgctaaaaagggtgaagccgttgatattggtaaagctgcctttactacttccctgaacttgttgtctaacctgttcttctctgttgaattggctcaacatacctcctcttcatcccaacatttcaaagaattgatctgggacatcatggaagatatcggtaagccaaattacgctgattatttcccagctttgaagtgtgttgatccatggggtattagaagaagattggctgctaatttcgaaaggttgatccaagtgttccagaacttcattagacagagattgtctaccgatccatcttctgttacaaatgcttctgatgttttggacgtcctgctgaacctatacaaagaaaaagaactgaacatgggcgagatcaaccatttgttggttgatatttttgatgccggtactgataccacttcttctacatttgaatgggctatggctgaattggttagacatccagaaattatgaagaaggcccaagacgaaatcgaacaagttttaggtaaggatgccaccattcaagaagctgatattccaaaaatgccatacttgcaggccatcatcaaagaaactttgagattgcatccaccaaccgtttttttgttgccaagaaaggctactaccaacgtcgaattatatggttacgttgttccaaagaacgcccaaatcttggttaatttgtgggctattggtagagatccattggtttgggatcagccaaacaaattttctccagaaaggttcttgaactccgatatcgatgttaagggtagagattttggtttgttgccttttggtgctggtagaagaatttgtccaggtatgaatttggcctacagaatgttgactttgatgttggctactctgttgcaatctttcgaatggaaggttcaaaatggtgaaaagcctgaagatttggacatggacgaaaaatttggtatcgccttgcaaaagactaagccattggaaattattcccgtcctgaagtactga

SEQ ID NO: 43 - protein, 499 aa, Chenopodium quinoa
MEHTILALILSILFICFHLVRSFVSHSTKSNKLPPGPKRMPIFGNIFDLGEKPHRSFANLAKIHGPLVSLQLGSITTIVVSSADVAKEMFLKNDQALANRTIPDSVRAGDHDKLSMSWLPISAKWRNLRKISAVQLLSNQRLDASQAHRQAKVEQLLAYVQDCSKKGQPVDIGRAAFTTSLNLLSNTFFSTELASHESNNSQEFKQLMWNIMEEIGKPNYADFFPILGYVDPFGIRRRLAGYFDKLIAVFQDIICERQKIRSTKVSSEKQTGDILDTLLNLYDENELSMGEINHLLVDIFDAGTDTTASTLEWAMAELVKNPGMMIRVQNEIELAIGKGCSMVQESDISKLPYLQAIIKETLRLHPPTVFLLPRKADVDVELYGYVVPKNAQVLVNLWAIGRDPKVWKNPEIFSPERFIGCDIDFKGRDFELLPFGAGRRICPGLTLAYRMLNLMMAYFVHSFDWKLEDGMNPKDLDMDEKFGITLQKVKPLQVIPVQR

SEQ ID NO: 44 - DNA, 1500 bp, Chenopodium quinoa
  source 1..1500: mol_type = other DNA
atggaacataccatcctggccttgatcttgtccattttgttcatttgcttccacttggtcaggtcctttgtttctcattctactaagtctaacaagttgccaccaggtccaaaaagaatgccaattttcggtaacatcttcgacttgggtgaaaagccacatagatcttttgctaacttggctaagattcacggtccattggtttctttacaattgggttctatcacgaccatcgttgtttcttcagctgatgttgctaaagaaatgttcttgaagaacgatcaagctttggccaacagaactattccagattctgttagagctggtgatcacgataagttgtctatgtcttggttgccaatttctgctaagtggcgtaacttgagaaagatttccgctgtccaactgttgtccaatcaaagattggatgcttctcaagctcatagacaagctaaagttgaacagttgttggcttacgttcaagactgttctaaaaagggtcaaccagttgatattggtagagctgcttttactacctccttgaacttgttgtctaacaccttcttctctaccgaattggcttctcatgaatccaacaactctcaagaattcaagcagttgatgtggaacatcatggaagaaattggtaagccaaactacgctgatttcttcccaattttgggttacgttgatccattcggcattagaagaagattggctggttacttcgacaagttgattgctgttttccaagacatcatttgcgagagacaaaagattaggtctaccaaggtttcctctgaaaagcaaactggtgatatcttggataccctgttgaacttatacgacgaaaacgaattgtccatgggtgaaatcaaccacttgttggttgatattttcgatgctggtactgataccactgcttctactttggaatgggctatggctgaattggttaagaatccaggtatgatgatcagagtccagaacgaaattgaattggctattggtaagggttgctccatggttcaagaatctgatatttctaagctgccatacttgcaggccattatcaaagaaactttgagattgcatccaccaaccgtttttttgttgccaagaaaagcagatgttgacgttgagttgtacggttatgttgttccaaagaatgctcaagtcttggttaacttgtgggctataggtagagatccaaaggtttggaaaaacccagaaatctttagcccagaaagattcattggttgcgatatcgatttcaagggtagagatttcgagttgttgccatttggtgctggtagaagaatttgtccaggtttgactttggcatacaggatgttgaatttgatgatggcttacttcgttcactccttcgattggaaattggaagatggtatgaacccaaaggacttggatatggacgaaaagtttggtatcaccttgcaaaaggttaagccattgcaagttatcccagtccaaagatga

SEQ ID NO: 45 - protein, 500 aa, Phytolacca americana
MDHTTIAMLVSIVFLCFHLIKSFSSHSKNPSQLPPGPKPLPIFGNIFELGEKPHRSFARLAKIHGPLISLKLGSVTTIVVSSSEVAKEMFLKHDQVLANRTIPDSVRAGNHDKLSMSWLPVSVKWRSLRKIVVVQLFSTQRLDVSQSLRHAKVQQLHEYITECSKKGEPVDIGRAAFTTSLNLLSNTFFSMELANHSSSASQEFKQLMWCIMEEIGRPNYADFFPILGYVDPFGIRRRLAVYFDKLIAVFQEIIRERQKARFTNLSTTNDVLDTLLNLYQENELSMDEINHLLVDIFDAGTDTTASTMEWAMAELVKNPDIMLKARIEIKQALGNDSSLIIQESDIAKLPYLQAIVKETLRLHPPTVFLLPRKAEANVQLYGYLIPKNAQLLVNLWAIGRDPNVWNDPLVFSPERFLASSSCEIDVKGRHFELLPFGAGRRICPGLTLAYRMLNLMLVTLVNSFDWKLEDVTSAKDLDMDEKFGITLQKVKPLQLIPIPK

SEQ ID NO: 46 - DNA, 1503 bp, Phytolacca americana
  source 1..1503: mol_type = other DNA
atggaccataccaccattgccatgttggtttctatcgttttcttgtgcttccacctgatcaagtctttctcatctcattctaagaacccatctcaattgccaccaggtccaaaaccattaccaattttcggtaacatcttcgagttgggtgaaaagccacatagatcttttgctagattggccaaaattcacggtccattgatttctttgaagttgggttctgttacgactatcgttgtctcttcatctgaagttgccaaagaaatgttcttgaagcacgatcaagttttggctaacagaactatcccagattctgttagagctggtaaccatgataagttgtctatgtcttggttgccagtttctgttaagtggcgttctttgagaaagatcgttgttgttcagttgttctctacccaaagattggatgtctctcaatctttgagacatgccaaggttcaacaattgcatgagtacattaccgagtgttctaaaaagggtgaaccagttgatattggtagagctgcttttactacctccttgaacttgttgtctaacaccttcttctctatggaattggccaaccattcttcatcagcttctcaagaattcaagcaattgatgtggtgcatcatggaagaaattggtagaccaaattacgccgatttcttcccaattttgggttacgttgatccattcggtatcagaagaagattggctgtttacttcgataagttgatcgctgtgttccaagaaatcatcagagaaagacaaaaggccagattcactaacttgtctactaccaacgatgttttggacaccttgctgaacttgtaccaagaaaatgaattgagcatggacgagatcaaccacttgttggttgatatttttgatgccggtactgataccactgcttctacaatggaatgggctatggctgaattggttaagaatccagatattatgttgaaggccaggatcgaaatcaaacaagctttgggtaatgactccagcttgatcattcaagaatctgatattgccaagctgccatacttgcaagctattgtcaaagaaaccttgagattgcatccaccaaccgtttttttgttgccaagaaaagctgaagctaacgtccaattatacggctacttgattccaaagaatgcccagttgttggttaacttgtgggctataggtagagatccaaatgtttggaatgaccccttggttttttcaccagaaagattcttggcttcctcctcttgtgaaattgatgttaagggtagacactttgagttgttgccatttggtgctggtagaagaatttgtccaggtttgactttggcatacaggatgttgaatttgatgttggtgactctggttaactccttcgattggaaattggaagatgtcacttctgccaaggatttggatatggacgaaaagtttggtatcaccttgcaaaaggttaagccattgcaattgatccccattccaaagtga

SEQ ID NO: 47 - protein, 494 aa, Abronia nealleyi
MDQTTLAMLLSALYLLYNLYKVIFTQSNSKLPPGPKPLPIFGNISELGAKPHRSFANLAKIHGPLITLKLGSVTTIVVSSAKVAEEMFLKNDLPLANRNVPNSVTAGDHHKLTMSWLPVSPKWKTFRKITAVHLLSPQRLDACQALRHAKVKQLYEYVYDCAKKGEAVDIGKAAFTTSLNLLSNLFFSVELAQHTSTSSQHFKQLIWDIMEDIGKPNYADYFPALKCVDPWGIRRRLAANFERLIDVFQDFIRPRLSMNPSSVTSASDVLDVLLNLYKEKELNMGEVNHLLVDIFDAGTDTTSSTFEWAMAELVRHPETMKKAQDEIEQVLGKDATIQEADIPKMPYLQAIIKETLRLHPPTVFLLPRKAATNVELYGYVVPKDAQILVNLWAIGRDPLVWDQPNVFSPERFLNSDVDVKGRDFGLLPFGAGRRICPGMNLAYRMLTLMLATLLQSFEWKVENGEKAEDLDMDEKFGIALQKTKPLQIIPVLKY

SEQ ID NO: 48 - DNA, 1485 bp, Abronia nealleyi
  source 1..1485: mol_type = other DNA
atggaccaaactaccttggccatgttgttgtctgcattatacctgctgtacaacctgtacaaggttatcttcactcagtccaattctaaattgccaccaggtccaaaaccattgccaatttttggtaacatctctgaattgggtgctaagccacatagatcttttgctaacttggctaagattcacggtccattgattactttgaagttgggttctgttacgaccatcgttgtttcttcagctaaagttgccgaagagatgttcttgaagaatgatttgccattggccaacagaaacgttccaaattctgttactgctggtgatcatcataagttgactatgtcttggttgccagtttctccaaagtggaaaaccttcagaaagattaccgctgttcatttgttgtccccacaaagattggatgcttgtcaagctttgagacatgctaaagttaagcagttgtacgaatacgtttacgattgtgctaaaaagggtgaagccgttgatattggtaaagctgcttttactacctccttgaacttgctgtctaacttgttcttctctgttgaattggctcaacatacctctacctcttcacaacatttcaagcaattgatctgggacatcatggaagatatcggtaagccaaattacgctgattatttcccagctttgaagtgtgttgatccatggggtattagaagaagattggctgctaatttcgaaaggttgatcgatgttttccaggacttcattagaccaaggttgtctatgaatccatcctctgttacttcagcttctgatgttttggatgtcctgctgaacttgtacaaagaaaaagaattgaacatgggcgaagtcaaccacttgttggttgatatttttgatgctggtactgacaccacttcttctacatttgaatgggctatggctgaattggttagacatccagaaactatgaagaaggcccaagacgaaattgaacaagttttgggtaaagatgccaccattcaagaagctgatattccaaaaatgccatacttgcaggccatcatcaaagaaactttgagattgcatccaccaaccgtttttttgttgccaagaaaagctgctaccaacgtcgaattatatggttacgttgttccaaaggatgcccaaatcttggttaatttgtgggctattggtagagatccattggtttgggatcaacctaatgttttctcaccagaaaggttcttgaactccgatgttgatgttaagggtagagattttggtttgttgccttttggtgcaggtagaagaatttgtccaggtatgaatttggcctacagaatgttgactttgatgttggctactctgttgcaatctttcgaatggaaggttgaaaatggtgaaaaggccgaagatttggatatggacgaaaaatttggtatcgccttgcaaaagactaagccattgcaaattattcccgtcctgaagtactga

SEQ ID NO: 49 - protein, 497 aa, Spinacia oleracea
MEDTTLAILLSISFVCFHVIRSFVSKTRSKSSELPPGPKRMPIFGNIFDLGDKPHRSFANLSKIHGPLVSLKLGSITTIVVSSADVAREMFLKNDLALANRTIPDSVRAGDHDKLSMSWLPVSAKWRNLRKISAVQLLSNQRLDASQAHRQAKVEQLLTYVKDCSKNGLPVDIGRAAFTTSLNLLSNTFFSVELASHESSASQEFKQLMWNIMEEIGKPNYADYFPILGYVDPFGIRRRLAAYFDQLIAVFQNIIQERQKIRSTNAKQTNDILDTLLNLHDENELSMGEINHLLVDIFDAGTDTTASTLEWAMAELVKNPEMMTKVQNEIEQAIGKDCATIQESDIAKLPYLQAIIKETLRLHPPTVFLLPRKADVDVELYGYVVPKNAQVLVNLWAIGRDPKVWKNPEVFSPERFLECDIDYKGRDFELLPFGAGRRICPGLTLAYRMLNLMMGNFLHSFDWKLEDGMSPKDLDMDEKFGITLQKVKPLQVIPVPR

SEQ ID NO: 50 - DNA, 1494 bp, Spinacia oleracea
  source 1..1494: mol_type = other DNA
atggaagataccaccttggccatcttgttgtctatttctttcgtttgcttccacgtcatcaggtcctttgtttctaagaccagatccaagtcatctgaattgccaccaggtccaaaaagaatgccaattttcggtaacatcttcgacttgggtgataagccacatagatcttttgctaacttgtccaagattcacggtccattggtttctttgaagttgggttctatcactaccatcgttgtttcttcagctgatgttgctagagaaatgttcttgaagaatgatttggctttggccaacagaaccattccagattctgttagagctggtgatcatgacaaattgtctatgtcttggttgccagtttctgctaaatggcgtaacttgagaaagatttctgctgtccagctgttgtccaatcaaagattggatgcttctcaagctcatagacaagctaaagttgaacagttgttgacctacgttaaggactgttctaaaaacggtttgccagttgatattggtagagctgcttttactacctccttgaacttgttgtcaaacaccttcttctctgttgaattggcctctcatgaatcttcagcttcccaagaattcaagcaattgatgtggaacatcatggaagaaatcggtaagccaaattacgctgattacttcccaattttgggttacgttgatccattcggtatcagaagaagattggctgcatacttcgaccaattgattgctgttttccagaacatcatccaagagagacaaaagattagatccaccaacgctaagcaaactaacgatattttggacaccttgttgaacttgcacgacgaaaatgaattatccatgggtgaaatcaaccacttgttggttgatattttcgatgctggtactgataccactgcttctactttggaatgggctatggctgaattggttaagaatccagaaatgatgaccaaggtccagaacgaaattgaacaagctattggtaaggattgcgccaccattcaagaatctgatattgctaaattgccatacttgcaggccattatcaaagagactttgagattgcatccacctaccgtttttttgttgccaagaaaagcagatgttgacgttgagttgtacggttatgttgttccaaagaacgctcaagttttggttaacttgtgggctataggtagagatccaaaggtttggaaaaacccagaagttttctcaccagaaaggttcttggaatgcgatattgattacaagggtagagacttcgagttgttgccatttggtgctggtagaagaatttgtccaggtttgactttggcatacaggatgttgaatttgatgatgggtaacttcttgcactccttcgattggaaattggaagatggtatgtctccaaaggacttggatatggacgaaaagtttggtatcaccttgcaaaaggttaagccattgcaagttattccagtgccaagatga

SEQ ID NO: 51 - protein, 500 aa, Spinacia oleracea
MENTTLALILSISFVCLHVIRSFLGKASSKSSKLPPGPKRMPIFGNIFDLGEKPHRSFANLAKIHGPLVSLKLGSITTIVVSSAEVAKEMFLKNDQVLANRTIPDSVRAGDHDKLSMSWLPVSAKWRNLRKISAVQLLSNQRLDASQAHRQAKVEQLLTYVQDCSKKGLPVDIGRAAFTTSLNLLSNTFFSVELASHESSASQEFKQLMWNIMEEIGKPNYADYFPILGYVDPFGIRRRLAAYFDQLIAVFQNIIQERQKIRSTNGSNAKQTNDILDTLLNLHDENELSMGEINHLLVDIFDAGTDTTASTLEWAMAELIKNPEMMTKVQNEIEQAVGKDCSAIQESDIAKLPYLQSIIKETLRLHPPTVFLLPRKADVDVELYGYVVPKNAQVLVNLWAIGRDPKVWKNPEIFSPERFLECDIDYKGRDFELLPFGAGRRICPGLTLAYRMLNLMMGNFLHSFDWKLEDGMNPKDLDMDEKFGITLQKVKPLQVIPVSR

SEQ ID NO: 52 - DNA, 1503 bp, Spinacia oleracea
  source 1..1503: mol_type = other DNA
atggaaaacaccaccttggccttgatcttgtctatttcttttgtttgcttgcacgtcatcaggtcttttttgggtaaagcttcctccaagtcatctaaattgccaccaggtccaaaaagaatgccaattttcggtaacatcttcgacttgggtgaaaagccacatagatcttttgctaacttggctaagattcacggtccattggtttctttgaagttgggttctatcactaccatcgttgtttcatctgctgaagttgccaaagaaatgttcttgaagaacgatcaagttttggccaacagaaccattccagattctgttagagctggtgatcatgacaaattgtctatgtcttggttgccagtttctgctaaatggcgtaacttgagaaagatttctgctgtccagttgttgtctaaccagagattggatgcttctcaagctcatagacaagctaaagttgaacagttgttgacctacgttcaagactgttctaaaaagggtttgccagttgatattggtagagctgcttttactacctccttgaacttgttgtccaacacctttttctctgttgaattggcctctcatgaatcctctgcttcacaagaattcaagcaattgatgtggaacatcatggaagaaatcggtaagccaaattacgctgattacttcccaattttgggttacgttgatccattcggtatcagaagaagattggctgcttacttcgaccaattgattgctgttttccagaacatcatccaagagagacaaaagattaggtctaccaatggttctaacgccaagcaaactaacgatatcttggataccttgttgaacttgcacgacgaaaacgaattatccatgggtgaaatcaaccacttgttggttgatattttcgatgctggtactgataccactgcttctactttggaatgggctatggctgaattgattaagaacccagaaatgatgaccaaggtccagaacgaaattgaacaagctgttggtaaagattgctccgccattcaagaatctgatattgcaaaattgccctacctgcagtccattatcaaagagactttgagattgcatccaccaaccgtttttttgttgccaagaaaagctgatgttgacgttgagttgtacggttatgttgttccaaagaatgctcaagtcttggttaacttgtgggctataggtagagatccaaaggtttggaaaaacccagagattttctcaccagaaaggttcttggaatgcgatattgattacaagggtagagacttcgagttgttgccatttggtgctggtagaagaatttgtccaggtttgactttggcatacaggatgttgaatttgatgatgggtaacttcttgcactccttcgattggaaattggaagatggtatgaacccaaaggacttggatatggacgaaaagtttggtatcaccttgcaaaaggttaagccattgcaagttatcccagtctctagatga

SEQ ID NO: 53 - protein, 498 aa, Spinacia oleracea
MENTTLAFILSISFVCFHVIRSFISKARSKSSKLPPGPKRMPIFGNIFDLGEKPHRSFANLSKIHGPLISLKLGSITTIVVSSADVAKEMFLKNDQALANRTIPDSVRAGDHDKLSISWLPVSAKWRNLRKISAVQLLSNQRLDASQAHRQAKVEQLLTYVKDCSKKGLPVDIGRAAFTTSLNLLSNTFFSVELASHESSASQEFKQLMWNIMEEIGKPNYADYFPILGYVDPFGIRRRLAAYFDQLIAVFQDIIQKRQKIRSTNGAKQTNDILDTLLNLHEENELSMGEINHLLVDIFDAGTDTTASTLEWAMAELVRNPEMMTKVQNEIEQAIGKNCATIQESDIPKLPYLQAIIKETLRLHPPTVFLLPRKADVDVELYGYVVPKNAQVLVNLWAIGRDPKVWKNSEVFSPERFLDCDIDYKGRDFELLPFGAGRRICPGLTLAYRMLNLMMGNFLHSFDWKLEDGMSPKDLDMDEKFGITLQKVKPLQVIPVPK

SEQ ID NO: 54 - DNA, 1497 bp, Spinacia oleracea
  source 1..1497: mol_type = other DNA
atggaaaacaccaccttggccttcatcttgtctatttctttcgtttgcttccacgtcatcaggtcctttatttctaaggccagatccaagtcatctaaattgccaccaggtccaaaaagaatgccaattttcggtaacatcttcgacttgggtgaaaagccacatagatcttttgctaacttgtccaagattcacggtccattgatttctttgaagttgggttctatcacgaccatcgttgtttcttcagctgatgttgctaaagaaatgttcttgaagaacgatcaagctttggccaacagaactattccagattctgttagagctggtgatcacgataagttgtcaatttcttggttgccagtttctgctaagtggcgtaatttgagaaagatttctgctgtccagttgttgtctaaccagagattggatgcttctcaagctcatagacaagctaaagttgaacagttgttgacctacgttaaggactgttctaaaaagggtttgccagttgatattggtagagctgcttttactacctccttgaacttgttgtccaacacctttttctctgttgaattggcctctcatgaatcctctgcttcacaagaattcaagcaattgatgtggaacatcatggaagaaatcggtaagccaaactacgctgattactttccaattttgggttacgttgatccattcggtatcagaagaagattggctgcttacttcgaccaattgattgctgttttccaagacatcatccagaagagacaaaagattaggtctaccaatggtgccaagcaaactaacgatattttggacactttgctgaacttgcacgaagaaaacgaattgtctatgggtgaaatcaaccacttgttggttgatattttcgatgctggtactgataccactgcttctactttggaatgggctatggctgaattggttagaaatccagaaatgatgaccaaggtccagaacgaaattgaacaagctattggtaagaactgcgccaccattcaagaatctgatattccaaaattgccatacttgcaggccatcatcaaagaaactttgagattgcatccaccaaccgtctttttgttgccaagaaaagcagatgttgatgtcgagttgtacggttatgttgttccaaagaacgcacaagttttggttaacttgtgggctataggtagagatccaaaggtttggaagaactccgaagttttttcaccagaaagattcttggattgcgacatcgattataagggtagagattttgagttgttgccatttggtgctggtagaagaatttgtccaggtttgactttggcatacaggatgttgaacttaatgatgggtaacttcttgcactccttcgattggaaattggaagatggtatgtctccaaaggacttggatatggacgaaaagtttggtatcaccttgcaaaaggttaagccattgcaagttattcccgttccaaagtga

SEQ ID NO: 55 - protein, 500 aa, Chenopodium quinoa
MDSTTLVMVVISILFVFLYHVKSFFIRYFSNRLPPGPKPKPIFGNIFDLGEKPHRSFANLAKIFGPLISLKLGNVTTVVVSSSYVAEEMFLKNDQSFANRTIPDSVRAGNHDKLSMSWLPISPQWRNLRKISAVQLLSTQRLDASQALRQAKVSQLHAYVQDCSKKLQPVNIGRAAFTTSLNLLSNTFFSIELASHESSTSQEFKQLMWNIMEEIGRPNYADYFPILGYIDPFGIRRRLASYFDELIVVFQNIICERQNIRSSDDSSAKHTNDVLDTLLNLYDKNELSMDEINHLLVDIFNAGTDTTASTLEWTMTELIKNPKSMIICQNEIEQALGKGSLSIQESDISKLPYLQAIMKETLRLHPPTVFLLPRKADSDVELCGYVVPKHAQVLVNLWAIGRDPKVWENPEVFSPERFLDCEIDLKGQDFELLPFGAGRRICPGLNLAYRMLNLMLATLLHNYNWKLEDGMTLNDLDMDEKFGITLQKVKPLQVVPIPRY

SEQ ID NO: 56 - DNA, 1503 bp, Chenopodium quinoa
  source 1..1503: mol_type = other DNA
atggactctaccaccttggttatggttgtcatttccatcttgttcgtgttcttgtaccacgtcaagtcattcttcatcaggtacttctctaatagattgccaccaggtccaaaacctaagccaatttttggtaacatcttcgacttgggtgaaaagccacatagatcttttgctaacttggctaagattttcggtcccttgatttctttgaagttgggtaatgttactaccgtcgttgtctcttcttcatacgttgctgaagaaatgttcttgaagaacgatcaatccttcgccaacagaactattccagattctgttagagctggtaaccacgataagttgtctatgtcttggttgccaatttctccacaatggcgtaacttgagaaagatttccgctgtccaattattgtctacccaaagattggatgcttcccaagctttgagacaagctaaagtttctcaattgcatgcctacgttcaagactgttctaaaaagttgcaaccagtcaacattggtagagctgcttttactacttccctgaacttgttgtctaacaccttcttctctattgaattggcctctcatgaatcctctacctctcaagaattcaagcaattgatgtggaacatcatggaagaaatcggtagaccaaattacgctgattacttcccaatcttgggttacattgatccattcggtatcagaagaagattggcttcttacttcgatgaactgatcgtcgttttccaaaacatcatttgcgaaaggcagaacatcagatcctctgatgattcttctgctaagcacactaacgatgtcttggatactttgttgaacctgtacgacaagaacgaattgtctatggacgaaatcaaccacttgttggttgatattttcaacgctggtactgataccactgcttctactttggaatggactatgaccgagttgattaagaacccaaagtccatgattatctgccagaacgaaattgaacaagccttaggtaaaggctccttgtccattcaagaatccgatatttctaagctgccatacttgcaagccattatgaaggaaactttgagattgcatccaccaaccgtttttttgttgccaagaaaagctgattccgatgttgaattgtgtggttacgttgttcctaaacatgcccaagttttggttaacttgtgggctataggtagagatccaaaggtttgggaaaatccagaagttttctcaccagaaagattcttggattgcgaaattgacttgaagggtcaagattttgagttgttgccatttggtgctggtagaagaatttgtccaggtttgaatttggcctacaggatgttgaacttgatgttggctactctgttgcataactacaactggaaattggaagatggcatgaccttgaacgatttggatatggatgagaagttcggtattaccttgcaaaaggttaagccattgcaagttgttccaattccaaggtactga

SEQ ID NO: 57 - protein, 498 aa, Spinacia oleracea
MDYTTLVIILSIMFVCFHLLKSFFTTPSSHKLPPGPKPIPIFGNIFYLGEKPHRSFANLAKIHGPLISLKLGSVTTIVVSSSYVAEEMFLKHDRAFANRTIPDSIRACDHDKLSMSWLPISLNWRNLRKISSVQLLSNQRLDASQAHRQAQVEQLLAYVQDCSIKGIPVDIGRAAFTTSLNLLSNTFFSVELASHESSASQEFKQLMWNIMEEIGKPNYADYFPILAYVDPFGVRRRLAAYFDQLIDVFQDIIKERQKIRLKNGSSAKQTNDILDTLLNLHDENELSMGEINHLLVDIFNAGTDTTASTLEWAMTELVRNPRIMGRVQHEIEQALEKDCSSIQEAYILKLPYLQAIIKETLRLHPPTVFLLPRKANIEVELHGFTVPKNAQILVNLWAVGRDPKVWENPKVFIPDRFLECDIDVKGQNFELLPFGAGRRICPGLGLAYRMLNLILATLIHNYDWKLEDGMNVNDLDMDEKFGITLQKVVPLKVIPVPR

SEQ ID NO: 58 - DNA, 1497 bp, Spinacia oleracea
  source 1..1497: mol_type = other DNA
atggactacaccaccttggtcatcatcttgtctattatgttcgtttgcttccacctgttgaagtcttttttcactactccatcctctcataagttgccaccaggtccaaaacctattccaattttcggtaacatcttctacttgggtgaaaagccacatagatcttttgctaacttggctaagattcacggtccattgatttctttgaagttgggttctgttacgacgatcgttgtttcttcttcatacgttgctgaagagatgttcttgaaacatgatagagctttcgccaacagaaccattccagattctattagagcttgcgatcacgacaaattgtctatgtcttggttgcccatttccttgaattggagaaacttgaggaagatctcttccgttcagttgttgtccaatcaaagattggatgcttctcaagctcatagacaagctcaagtcgaacaattattggcttacgttcaagactgctccattaagggtattccagttgatattggtagagctgcttttaccacttccttgaacttgttgtctaacaccttcttctctgttgaattggcctctcatgaatcttcagcttcccaagaattcaagcaattgatgtggaacatcatggaagaaatcggtaagccaaattacgctgattacttcccaattttggcctacgtagatccatttggtgttagaagaagattggctgcctacttcgaccaattgattgatgttttccaggacatcatcaaagagcgtcaaaagatcagattgaagaacggttcatctgccaagcaaactaacgatattttggacaccttgttgaacttgcacgacgaaaatgaattatccatgggtgaaatcaaccacttgttggttgatattttcaacgctggtactgataccactgcttctactttggaatgggctatgactgaattggttagaaaccctagaatcatgggtagagttcaacacgaaattgaacaagctttggaaaaggactgctcctctattcaagaagcctacattttgaaactgccatacttgcaggccattatcaaagaaactttgagattgcatccaccaaccgtttttttgttgccaagaaaggctaacatcgaagtcgaattgcatggttttactgttccaaagaacgcccaaatcttggttaatttgtgggctgttggtagagatccaaaggtttgggaaaatcctaaggttttcatcccagacagattcttggaatgcgatattgatgttaagggtcagaactttgagttgttgccttttggtgctggtagaagaatttgtccaggtttgggtttagcttacaggatgttgaatttgatcttggccaccttgatccataactacgattggaaattggaggatggtatgaacgttaacgatttggatatggacgaaaagttcggtatcaccttgcaaaaagttgttccattgaaggttatccccgttccaagataa

SEQ ID NO: 59 - protein, 496 aa, Mirabilis jalapa
MDFLTLVMILSIIFFFYNLLKMKFTTHSDAQLPPGPKPMPIFGNIFELGEKPHRSFANLAKTHGPLMSLRLGSVTTIVVSSAEVAKEMFLKNDQSLADRSVPNSVTAGDHHKLTMSWLPVSPKWKNFRKITAVHLLSPQRLDACHALRHAKVKQLYEYVQECALKGEAVDIGKAAFTTSLNLLSNLFFSVELANHTSNTSQEFKQLIWDIMEDIGKPNYADYFPLLKYVDPSGIRRRLAANFDKLIDVFQSFISKRLSSAYSSATSLDDVLDVLLKLLKEKELNMGEINHLLVDIFDAGTDTTSNTFEWAMAELMRNPIMMKRAQNEIALVLGKDNATIQESDIANMPYLQAIIKETLRLHPPTVFLLPRKAITNVKLYGYIVPKNAQILVNLWAIGRDPKVWKNPNEFLPDRFLNSDIDVKGRDFGLLPFGAGRRICPGMNLAYRMLTLMLATLLQSFDWKLPHRNSPLDLDMDEKFGIALQKTKPLEIIPLIKY

SEQ ID NO: 60 - DNA, 1491 bp, Mirabilis jalapa
  source 1..1491: mol_type = other DNA
atggacttcttgaccctggtcatgatcttgtctattatcttcttcttctacaacctgctgaagatgaagttcactactcattctgatgctcaattgccaccaggtccaaaacctatgccaatttttggtaacatcttcgagttgggtgaaaagccacatagatcttttgctaacttggctaaaactcacggtccattgatgtctttgagattgggttctgttactaccatcgttgtttcatctgctgaagttgccaaagaaatgttcttgaagaacgatcaatccttggccgatagatctgttccaaattctgttacagctggtgatcatcataagttgactatgtcttggttgccagtttctccaaagtggaagaacttcagaaagattaccgctgttcatttgttgtccccacaaagattggatgcttgtcatgctttgagacatgctaaagttaagcagttgtacgaatacgttcaagaatgtgctttgaagggtgaagctgttgatattggtaaagctgctttcaccacttccttgaacttgttgtctaacttgttcttctccgttgaattggctaaccatacttctaacacctctcaagaattcaagcaattgatctgggacatcatggaagatatcggtaagccaaattacgctgattacttccccttgttgaaatacgttgatccatccggtattagaagaaggttggctgctaatttcgataagttgatcgacgttttccagtccttcatctctaagagattatcctctgcttactcttctgctacctctttggatgatgttttggatgtcttgttgaagttgttgaaagaaaaagaactgaacatgggcgagatcaaccatttgttggttgatatttttgatgccggtactgataccacctctaatacttttgaatgggctatggctgaattgatgagaaacccaattatgatgaagagagcccaaaacgaaattgccttggttttgggtaaagataacgccaccattcaagaatccgatattgctaatatgccatacttgcaggccatcatcaaagaaacattgagattgcatccaccaaccgtttttttgttgccaagaaaggctattaccaacgtcaagttgtatggttacatcgttccaaagaacgcccaaatcttggttaatttgtgggctattggtagagatccaaaggtttggaagaatccaaacgaattcttgccagataggttcttgaactctgatatcgatgttaagggtagagactttggtttgttaccatttggtgctggtagaagaatttgtccaggtatgaatttggcctacagaatgttgactttgatgttggctactctgttgcaatctttcgattggaagttgcctcatagaaactctccattggatttggatatggacgaaaagtttggtatcgccttgcaaaaaactaagccattggaaatcatcccactgatcaagtactga

SEQ ID NO: 61 - protein, 496 aa, Mirabilis multiflora
MDFLTLVMILSMIFFFYNLLKMIFTTHSDAQLPPGPKPMPIFGNIFELGEKPHRSFANLAKTHGPLMSLRLGRVTTIVVSSAEVAKEMFLKNDQSLADRSVPNSVTAGDHHKLTMSWLPVSPKWKNFRKITAVHLLSPQRLDACNALRHAKVKQLYEYVQECALKGEAVDIGKAAFTTSLNLLSNLFFSVELANHTSNTSQEFKQLIWDIMEDIGKPNYADYFPLLKYVDPSGIRRRLAANFDKLIDVFQSFICKRLSSAYSSATSLDDVLDVLLKLYKEKELNMGEINHLLVDIFDAGTDTTSNTFEWAMSELIRNPTMMKRAQNEIALVLGKDNGTIQESDIANMPYLQAIIKETLRLHPPTVFLLPRKAITYVKLYGYIVPKNAQILVNLWAIGRDPKVWKNPNEFLPDRFLNSDIDVKGRDFGLLPFGAGRRICPGMNLAYRMLTLMLATLLQSFDWKLPHGNSPMDLDMDEKFGIALQKTKPLEIIPVIKY

SEQ ID NO: 62 - DNA, 1491 bp, Mirabilis multiflora
  source 1..1491: mol_type = other DNA
atggacttcttgaccctggtcatgatcttgtctatgatcttcttcttctacaacctgctgaagatgattttcactacccattctgatgctcaattgccaccaggtccaaaacctatgccaatttttggtaacatcttcgagttgggtgaaaagccacatagatcttttgctaacttggctaaaactcacggtccattgatgtctttgagattgggtagagttactaccatcgttgtttcatctgctgaagttgccaaagaaatgttcttgaagaacgatcaatccttggccgatagatctgttccaaattctgttactgctggtgatcatcataagttgactatgtcttggttgccagtttctccaaagtggaagaacttcagaaagattaccgctgttcatttgttgtccccacaaagattggatgcttgtaatgctttgagacatgctaaggttaagcagttgtacgaatacgttcaagaatgtgctttgaagggtgaagctgttgatattggtaaagctgctttcaccacttccttgaacttgttgtctaacttgttcttctccgttgaattggctaaccatacttctaacacctctcaagaattcaagcaattgatctgggacatcatggaagatatcggtaagccaaattacgctgattacttccccttgttgaaatacgttgatccatccggtattagaagaaggttggctgctaatttcgataagttgatcgacgttttccagtccttcatctgtaagagattatcctctgcttactcttctgctacctctttggatgatgttttggatgtcttgttgaagctgtacaaagaaaaagaattgaacatgggcgagatcaaccacttgttggttgatatttttgatgccggtactgataccacctctaatacttttgaatgggccatgtccgaattgattagaaacccaactatgatgaagagagcccaaaacgaaattgctttggttttgggtaaagataacggcaccattcaagaatccgatattgctaatatgccatacttgcaggccatcatcaaagaaacattgagattgcatccaccaaccgtttttttgttgccaagaaaggctattacctacgtcaagttgtatggttacatcgttccaaagaacgcccaaatcttggttaatttgtgggctattggtagagatccaaaggtttggaagaatccaaacgaattcttgccagataggttcttgaactctgatatcgatgttaagggtagagactttggtttgttaccatttggtgctggtagaagaatttgtccaggtatgaatttggcctacagaatgttgactttgatgttggctactctgttgcaatctttcgattggaaattgccacatggtaactctccaatggatttggatatggacgaaaagtttggtatcgccttgcaaaaaactaagcccttggaaattatccccgtcatcaagtactaa

SEQ ID NO: 63 - protein, 499 aa, Beta vulgaris
MDHATLAMILAILFISFHFIKLLFSQQTTKLLPPGPKPLPIIGNILEVGKKPHRSFANLAKIHGPLISLRLGSVTTIVVSSADVAKEMFLKKDHPLSNRTIPNSVTAGDHHKLTMSWLPVSPKWRNFRKITAVHLLSPQRLDACQTFRHAKVQQLYEYVQECAQKGQAVDIGKAAFTTSLNLLSKLFFSVELAHHKSHTSQEFKELIWNIMEDIGKPNYADYFPILGCVDPSGIRRRLACSFDKLIAVFQGIICERLAPDSSTTTTTTTDDVLDVLLQLFKQNELTMGEINHLLVDIFDAGTDTTSSTLEWVMTELIRNPEMMEKAQEEIKQVLGKDKQIQESDIINLPYLQAIIKETLRLHPPTVFLLPRKADTDVELYGYIVPKDAQILVNLWAIGRDPNAWQNADIFSPERFIGCEIDVKGRDFGLLPFGAGRRICPGMNLAIRMLTLMLATLLQFFNWKLEGDISPKDLDMDEKFGIALQKTKPLKLIPIPRYGS

SEQ ID NO: 64 - DNA, 1500 bp, Beta vulgaris
  source 1..1500: mol_type = other DNA
atggatcatgctaccttggctatgattttggccatcttgttcattagcttccacttcatcaagctgttgttctctcaacaaactaccaagttgttgccaccaggtccaaaaccattgccaattattggtaacatcttggaggttggtaagaagccacatagatcttttgctaatttggccaagattcacggtccattgatttctttgagattgggttctgttacgaccatcgttgtttcttcagctgatgttgctaaagagatgttcttgaagaaggatcacccattgtccaacagaactattccaaattctgttaccgctggtgatcatcataagttgactatgtcttggttgccagtttctccaaagtggcgtaatttcagaaagattaccgctgttcatttgttgtccccacaaagattggatgcttgtcaaacttttagacacgctaaggttcaacagttgtacgaatacgttcaagaatgtgctcaaaaaggtcaagccgttgatattggtaaagctgcttttactacctccttgaacttgctgtctaagttgttcttctctgttgaattggctcatcacaagtctcatacctctcaagaattcaaagagctgatctggaacatcatggaagatatcggtaagccaaattacgctgattacttcccaattttgggttgcgttgatccatctggtattagaagaagattggcttgctctttcgataagttgattgctgttttccaaggtatcatctgtgaaagattagccccagattcttctactactacaactactaccactgatgatgttttggatgtgttgttgcagttgttcaagcaaaacgaattgaccatgggtgaaatcaaccacttgttggttgatattttcgatgctggtactgataccacttcctctactttggaatgggttatgaccgaattgatcagaaacccagaaatgatggaaaaggcccaagaagagattaagcaagttttgggtaaagacaagcagatccaagaatccgatattatcaacttgccatacttgcaggccatcatcaaagaaacattgagattgcatccaccaaccgtttttttgttgccaagaaaagctgataccgatgttgagttgtatggttacatcgttccaaaggatgcccaaatcttggttaatttgtgggctattggtagagatccaaatgcttggcaaaacgccgatattttctcaccagaaaggttcattggttgcgaaattgatgttaagggtagagactttggtttgttgccttttggtgctggtagaaggatttgtccaggtatgaatttggctatcagaatgttgactttgatgctggctactctgttgcaatttttcaactggaaattggagggtgacatctcaccaaaagatttggatatggacgaaaagttcggtatcgccttgcaaaaaactaagccattgaagttgatccccattcctagatacggttcttga

SEQ ID NO: 65 - protein, 499 aa, Spinacia oleracea; identical to SEQ ID NO: 63

SEQ ID NO: 66 - DNA, 1500 bp, Spinacia oleracea; identical to SEQ ID NO: 64
  source 1..1500: mol_type = other DNA

SEQ ID NO: 67 - protein, 705 aa, Beta vulgaris
MDSNSIKVSPLDLMSALLKGNFEQLNASFEDSSAAALIVENREVLMFVTTSIAVLIGCAFLFIWKKSNGGKSSKVVSELPKPLILKDDDVEVDDGKKKVTVFFGTQTGTAEGFAKALVEEAKARYEKATFKIVDLDDYAGDDDEYERKLKKENLAFFFLATYGDGEPTDNAARFYKWFLEGKDRGEWLQNLEYGVFGLGNRQYEHFNKVGKEIDELLAEQGAKRLVPVGLGDDDQCIEDDFTAWKDLVWPELDRLLRDEDDVAVSTPYTATIPEYRVVFHEAAEVAQQDKSWANANGHAVFDAQHPCRSNVAVRRELHTPASDRSCTHLEFDVSGTGLKYETGDHVGVYCENLVETVEEAERLLGLKDTYFSIHTDNEDGTPVAGTSLPPPFPPCTLRSALTRYADLLSSPKKSALLALAAHASDPNEAKRLKYLASPAGKDEYSQWVVASQRSLLEVMAEFPSAKPPLGVFFAAVAPRLQPRYYSISSSPRVAPSRIHVTCALVLDKMPTGRIHKGVCSTWMKNSVAQGESHDCSWAPIFVRQSNFKLPADSSVPIIMIGPGTGLAPFRGFLQERSALKEDGVDLGQAILFFGCRNRKVDFIYEDELQNFVETGVLSELVVAFSREGPTKEYVQHKMMERASDVWNVINQGGYVYVCGDAKGMARDVHRVLHTILQEQGGMGSSQAEGMVKNLQTTGRYLRDVW

SEQ ID NO: 68 - DNA, 2118 bp, Beta vulgaris
  source 1..2118: mol_type = other DNA
atggactccaactccatcaaggtttctccattggatttgatgtctgctttgttgaagggtaacttcgaacaattgaacgcctctttcgaagattcttctgctgctgctttgatcgttgaaaacagagaagttttgatgttcgtcaccacctctattgctgttttgattggttgtgccttcttgttcatctggaaaaagtctaacggtggcaagtcctctaaagttgtttctgaattgccaaagccactgatcttgaaggatgatgatgttgaagttgatgacggtaagaagaaggttactgttttcttcggtactcaaactggtactgctgaaggttttgctaaagctttggttgaagaggctaaagccagatacgaaaaggctacttttaagatcgttgacttggatgattacgccggtgatgatgacgaatacgaaagaaagttgaagaaagagaacctggctttcttcttcttggctacttatggtgatggtgaacctactgataatgctgctagattttacaagtggttcttggaaggtaaggatagaggtgaatggttgcaaaatttggagtacggtgtttttggtttgggtaacagacaatacgaacacttcaacaaggtcggtaaagaaatcgatgaactgttggctgaacaaggtgctaaaagattggttccagttggtttaggtgatgacgatcaatgtatcgaagatgattttaccgcttggaaagatttggtatggccagaattggacagactgttgagagatgaagatgatgtagctgtttctactccatacactgctactattccagagtacagagttgtttttcatgaagctgctgaagttgcccaacaagataagtcttgggctaatgctaatggtcatgctgtttttgatgctcaacatccatgtagatctaacgttgctgttagaagagaattgcatactccagcttcagatagatcttgtacccatttggaattcgatgtttctggtactggtttgaagtacgaaactggtgatcatgttggtgtttactgcgaaaacttggttgaaactgttgaagaagctgaaaggttgttgggtttgaaggatacctacttctctatccataccgataacgaagatggtactccagttgctggtacttctttgccaccaccatttccaccatgtactttgagatctgctttgactagatacgccgatttgttgtcctctccaaaaaaatctgctttattggccttggctgctcatgcttctgatccaaatgaagctaagagattgaagtacttggcttctccagctggtaaagatgaatattctcaatgggttgttgcctctcagagatctttgttggaagttatggctgaatttccatctgctaaaccaccattgggtgttttttttgctgctgttgctccaagattgcagccaagatattactccatttcatcttctccaagagttgccccatctagaattcatgttacttgtgctttggtgttggataagatgccaactggtagaattcacaagggtgtttgttcaacctggatgaagaattctgttgctcaaggtgaatctcatgattgctcttgggctccaattttcgttagacaatctaactttaagttgcccgctgattcttccgttccaattatcatgattggtccaggtacaggtttggctccttttagaggttttctacaagaaaggtccgccttgaaagaagatggcgttgatttgggtcaagccattttgttttttggctgcagaaacagaaaggtcgacttcatatacgaagatgagttgcaaaacttcgtcgaaacaggtgttttgtccgaattggttgttgctttttctagagaaggtcccaccaaagaatacgttcaacataagatgatggaaagagcttctgacgtttggaacgttatcaatcaaggtggttacgtttacgtttgcggtgatgctaaaggtatggcaagagatgttcatagagtcttgcataccatcctacaagagcaaggtggtatgggttcttctcaagctgaaggtatggttaagaacttgcaaactactggtagatacttgagggatgtttggtaa

SEQ ID NO: 69 - protein, 472 aa, Pseudomonas putida
MTPEQFRQYGHQLIDLIADYRQTVGERPVMAQVEPGYLKAALPATAPQQGEPFAAILDDVNNLVMPGLSHWQHPDFYGYFPSNGTLSSVLGDFLSTGLGVLGLSWQSSPALSELEETTLDWLRQLLGLSGQWSGVIQDTASTSTLVALISARERATDYALVRGGLQAEPKPLIVYVSAHAHSSVDKAALLAGFGRDNIRLIPTDERYALRPEALQAAIEQDLAAGNQPCAVVATTGTTTTTALDPLRPVGEIAQANGLWLHVDSAMAGSAMILPECRWMWDGIELADSVVVNAHKWLGVAFDCSIYYVRDPQHLIRVMSTNPSYLQSAVDGEVKNLRDWGIPLGRRFRALKLWFMLRSEGVDALQARLRRDLDNAQWLAGQVEAAAEWEVLAPVQLQTLCIRHRPAGLEGEALDAHTKGWAERLNASGAAYVTPATLDGRWMVRVSIGALPTERGDVQRLWARLQDVIKGGS

SEQ ID NO: 70 - DNA, 1419 bp, Pseudomonas putida
  source 1..1419: mol_type = other DNA
atgaccccagaacaattcagacaatacggtcaccaattgattgatttgatcgccgattacagacaaaccgttggtgaaagaccagttatggctcaagttgaaccaggttatttgaaagctgctttgccagctactgctccacaacaaggtgaaccatttgctgctattttggatgatgttaacaacttggttatgccaggtttgtctcattggcaacatccagatttttacggttactttccatccaacggtactttgtcatctgttttgggtgatttcttgtctactggtttgggtgttttaggtttgtcatggcaatcttctccagctttgtcagaattggaagaaactactttggattggttgagacagttgttgggtttatctggtcaatggtctggtgttattcaagatactgcttctacttctaccttggttgctttgatttctgctagagaaagagctactgattacgctttggttagaggtggtttacaagctgaacctaaaccattgatcgtttacgtttctgctcatgcccattcttcagttgataaggctgctttgttggctggttttggtagagataacattagattgattccaaccgacgaaagatacgccttaagaccagaagctttacaagcagctattgaacaagatttggctgctggtaatcaaccatgtgctgttgttgctactactggtactactactacaactgctttggatccattaagacctgtaggtgaaattgctcaagctaatggtttgtggttgcatgttgattcagctatggctggttctgctatgattttgccagaatgtagatggatgtgggatggtattgaattggctgattctgttgttgttaacgcccataagtggttgggtgttgcttttgattgctctatctactacgttagagatccacaacacttgatcagagtcatgtctactaatccatcctacttgcaatctgctgttgatggtgaagttaagaacttgagagattggggtattccattgggtagaagattcagagctttgaagttgtggtttatgttgagatccgaaggtgttgatgcattgcaagctagattgagaagagatttggataatgctcaatggttggctggacaagttgaagctgctgctgaatgggaagttttggctccagttcaattgcaaaccttgtgcattagacatagaccagcaggtttggaaggtgaagctttggatgctcatacaaaaggttgggctgaaagattgaatgcttctggtgctgcttatgttactccagctactttagatggaagatggatggttagagtttccattggtgctttaccaactgaaagaggtgacgttcaaagattgtgggctagattacaagatgtcatcaaaggtggttcctaa

SEQ ID NO: 71 - protein, 200 aa, Pseudomonas putida
MTPEQFRQYGHQLIDLIADYRQTVGERPVMAQVEPGYLKAALPATAPQQGEPFAAILDDVNNLVMPGLSHWQHPDFYGYFPSNGTLSSVLGDFLSTGLGVLGLSWQSSPALSELEETTLDWLRQLLGLSGQWSGVIQDTASTSTLVALISARERATDYALVRGGLQAEPKPLIVYVSAHAHSSVDKAALLAGFGRDNIRL

SEQ ID NO: 72 - DNA, 1419 bp, Pseudomonas putida; identical to SEQ ID NO: 70
  source 1..1419: mol_type = other DNA

SEQ ID NO: 73 - protein, 178 aa, Coptis japonica
MERLIFNGRPLLHRVTKEETVMLYHELEVAASADEVWSVEGSPELGLHLPDLLPAGIFAKFEITGDGGEGSILDMTFPPGQFPHHYREKFVFFDHKNRYKLVEQIDGDFFDLGVTYYMDTIRVVATGPDSCVIKSTTEYHVKPEFAKIVKPLIDTVPLAIMSEAIAKVVLENKHKSSE

SEQ ID NO: 74 - DNA, 537 bp, Coptis japonica
  source 1..537: mol_type = other DNA
atggaaagattgatcttcaatggtagacctttgttgcacagagttaccaaagaagaaaccgttatgttgtaccacgaattggaagttgctgcttctgctgatgaagtttggtctgttgaaggttctccagaattgggtttacatttgccagatttgttgccagctggtatttttgccaagttcgaaattactggtgatggtggtgaaggttccattttggatatgacttttccaccaggtcaattcccacatcattacagagaaaagttcgtctttttcgaccacaagaacagatacaagttggtcgaacaaatcgatggtgatttcttcgatttgggtgttacttactacatggacaccattagagttgttgctactggtccagattcttgcgttattaagtctactactgaataccacgtcaagccagaatttgctaaaatcgttaagccattgatcgataccgttccattggctattatgtctgaagctattgccaaggttgtcttggaaaacaaacacaagtcatctgaatga

SEQ ID NO: 75 - DNA, 537 bp, Coptis japonica; identical to SEQ ID NO: 74
  source 1..537: mol_type = other DNA

SEQ ID NO: 76 - protein, 200 aa, Coptis japonica
MRMEVVLVVFLMFIGTINCERLIFNGRPLLHRVTKEETVMLYHELEVAASADEVWSVEGSPELGLHLPDLLPAGIFAKFEITGDGGEGSILDMTFPPGQFPHHYREKFVFFDHKNRYKLVEQIDGDFFDLGVTYYMDTIRVVATGPDSCVIKSTTEYHVKPEFAKIVKPLIDTVPLADMSEAIAKVVLENKHKSSEHDEL

SEQ ID NO: 77 - DNA, 603 bp, Coptis japonica
  source 1..603: mol_type = other DNA
atgagaatggaagtcgtcttggtcgttttcttgatgttcattggtactatcaactgcgaaagattgatcttcaatggtagacctttgttgcacagagttaccaaagaagaaaccgttatgttgtaccacgaattggaagttgctgcttctgctgatgaagtttggtctgttgaaggttctccagaattgggtttacatttgccagatttgttgccagctggtatttttgccaagttcgaaattactggtgatggtggtgaaggttccattttggatatgacttttccaccaggtcaattcccacatcattacagagaaaagttcgtctttttcgaccacaagaacagatacaagttggtcgaacaaatcgatggtgatttcttcgatttgggtgttacttactacatggacaccattagagttgttgctactggtccagattcttgcgttattaagtctactactgaataccacgtcaagccagaatttgctaaaatcgttaagccattgatcgataccgttccattggctgatatgtctgaagctattgccaaggttgtcttggaaaacaaacacaagtcatctgaacatgatgaattgtga

SEQ ID NO: 78 - DNA, 5784 bp, unidentified
  source 1..5784: mol_type = other DNA; note = (plasmid vector?)
agcgacctcatgctatacctgagaaagcaacctgacctacaggaaagagttactcaagaataagaattttcgttttaaaacctaagagtcactttaaaatttgtatacacttattttttttataacttatttaataataaaaatcataaatcataagaaattcgcttatttagaagtgtcaacaacgtatctaccaacggaatgcgtgcgatcgcgtgcattcatccgctctaaccgaaaaggaaggagttagacaacctgaagtctaggtccctatttatttttttatagttatgttagtattaagaacgttatttatatttcaaatttttcttttttttctgtacagacgcgtgtacgcatgtaacattatactgaaaaccttgcttgagaaggttttgggacgctcgaagatcgcgtcagcggccgctaccgttcgtataatgtatgctatacgaagttatcccgggtatatatatttcaaggatataccattctaatgtctgcccctaagaagatcgtcgttttgccaggtgaccacgttggtcaagaaatcacagccgaagccattaaggttcttaaagctatttctgatgttcgttccaatgtcaagttcgatttcgaaaatcatttaattggtggtgctgctatcgatgctacaggtgttccacttccagatgaggcgctggaagcctccaagaaggctgatgccgttttgttaggtgctgtgggtggtcctaaatggggtaccggtagtgttagacctgaacaaggtttactaaaaatccgtaaagaacttcaattgtacgccaacttaagaccatgtaactttgcatccgactctcttttagacttatctccaatcaagccacaatttgctaaaggtactgacttcgttgttgtcagagaattagtgggaggtatttactttggtaagagaaaggaagacgatggtgatggtgtcgcttgggatagtgaacaatacaccgttccagaagtgcaaagaatcacaagaatggccgctttcatggccctacaacatgagccaccattgcctatttggtccttggataaagctaatgttttggcctcttcaagattatggagaaaaactgtggaggaaaccatcaagaacgaattccctacattgaaggttcaacatcaattgattgattctgccgccatgatcctagttaagaacccaacccacctaaatggtattataatcaccagcaacatgtttggtgatatcatctccgatgaagcctccgttatcccaggttccttgggtttgttgccatctgcgtccttggcctctttgccagacaagaacaccgcatttggtttgtacgaaccatgccacggttctgctccagatttgccaaagaataaggtcaaccctatcgccactatcttgtctgctgcaatgatgttgaaattgtcattgaacttgcctgaagaaggtaaggccattgaagatgcagttaaaaaggttttggatgcaggtatcagaactggtgatttaggtggttccaacagtaccaccgaagtcggtgatgctgtcgccgaagaagttaagaaaatccttgcttaaaaagattctctttttttatgatatttgtacataaactttataaatgaaattcataatagaaacgacacgaaattacaaaatggaatatgttcatagggtagacgaaactatatacgcaatctacatacatttatcaagaaggagaaaaaggaggatgtaaaggaatacaggtaagcaaattgatactaatggctcaacgtgataaggaaaaagaattgcactttaacattaatattgacaaggaggagggcaccacacaaaaagttaggtgtaacagaaaatcatgaaactatgattcctaatttatatattggaggattttctctaaaaaaaaaaaaatacaacaaataaaaaacactcaatgacctgaccatttgatgcccgggataacttcgtatagcatacattatacgaacggtagcggccgcctaaagcaatgagactgagagatgaagtatcaggaaatcacctgcacgtatgctatatcgaaaccaaaaagaatattgcagacgtaatgaccaaacctcttccgataaaaacattcaaactattaacaaacaaatggattcattagatctattacattatgggtggtatgttggaataaaaatccactatcgtctatcaactaatagttatattatcaatatattatcatatacggtgttaagatgatgacataagttatgagaagctgtcatcgaagttagaggaagctgaagtgcaaggattgataatgtaataggataatgaaacatataaaacggaatgaggaataatcgtaatattagtatgtagaaatatagattccattttgaggattcctatatccttgaggagaacttctagtatattctgtatacctaatattatagcctttatcaacaatggaatcccaacaattatctcaacattcacccatttctcagcgcgcaacctaggtgagctctggtaccctctagtcaaggccttaagtgagtcgtattacggactggccgtcgttttacaacgtcgtgactgggaaaaccctggcgttacccaacttaatcgccttgcagcacatccccctttcgccagctggcgtaatagcgaagaggcccgcaccgatcgcccttcccaacagttgcgcagcctgaatggcgaatggcgcttcgcttggtaataaagcccgcttcggcgggcttttttttgttaactacgtcaggtggcacttttcggggaaatgtgcgcggaacccctatttgtttatttttctaaatacattcaaatatgtatccgctcatgagacaataaccctgataaatgcttcaataatattgaaaaaggaagagtatgagtattcaacatttccgtgtcgcccttattcccttttttgcggcattttgccttcctgtttttgctcacccagaaacgctggtgaaagtaaaagatgctgaagatcagttgggtgcacgagtgggttacatcgaactggatctcaacagcggtaagatccttgagagttttcgccccgaagaacgttctccaatgatgagcacttttaaagttctgctatgtggcgcggtattatcccgtgttgacgccgggcaagagcaactcggtcgccgcatacactattctcagaatgacttggttgagtactcaccagtcacagaaaagcatcttacggatggcatgacagtaagagaattatgcagtgctgccataaccatgagtgataacactgcggccaacttacttctgacaacgatcggaggaccgaaggagctaaccgcttttttgcacaacatgggggatcatgtaactcgccttgatcgttgggaaccggagctgaatgaagccataccaaacgacgagcgtgacaccacgatgcctgtagcaatggcaacaacgttgcgcaaactattaactggcgaactacttactctagcttcccggcaacaattaatagactggatggaggcggataaagttgcaggaccacttctgcgctcggcccttccggctggctggtttattgctgataaatctggagccggtgagcgtgggtctcgcggtatcattgcagcactggggccagatggtaagccctcccgtatcgtagttatctacacgacggggagtcaggcaactatggatgaacgaaatagacagatcgctgagataggtgcctcactgattaagcattggtaactgtcagaccaagtttactcatatatactttagattgatttaccccggttgataatcagaaaagccccaaaaacaggaagattgtataagcaaatatttaaattgtaaacgttaatattttgttaaaattcgcgttaaatttttgttaaatcagctcattttttaaccaataggccgaaatcggcaaaatcccttataaatcaaaagaatagcccgagatagggttgagtgttgttccagtttggaacaagagtccactattaaagaacgtggactccaacgtcaaagggcgaaaaaccgtctatcagggcgatggcccactacgtgaaccatcacccaaatcaagttttttggggtcgaggtgccgtaaagcactaaatcggaaccctaaagggagcccccgatttagagcttgacggggaaagcgaacgtggcgagaaaggaagggaagaaagcgaaaggagcgggcgctagggcgctggcaagtgtagcggtcacgctgcgcgtaaccaccacacccgccgcgcttaatgcgccgctacagggcgcgtaaaaggatctaggtgaagatcctttttgataatctcatgaccaaaatcccttaacgtgagttttcgttccactgagcgtcagaccccgtagaaaagatcaaaggatcttcttgagatcctttttttctgcgcgtaatctgctgcttgcaaacaaaaaaaccaccgctaccagcggtggtttgtttgccggatcaagagctaccaactctttttccgaaggtaactggcttcagcagagcgcagataccaaatactgttcttctagtgtagccgtagttaggccaccacttcaagaactctgtagcaccgcctacatacctcgctctgctaatcctgttaccagtggctgctgccagtggcgataagtcgtgtcttaccgggttggactcaagacgatagttaccggataaggcgcagcggtcgggctgaacggggggttcgtgcacacagcccagcttggagcgaacgacctacaccgaactgagatacctacagcgtgagctatgagaaagcgccacgcttcccgaagggagaaaggcggacaggtatccggtaagcggcagggtcggaacaggagagcgcacgagggagcttccagggggaaacgcctggtatctttatagtcctgtcgggtttcgccacctctgacttgagcgtcgatttttgtgatgctcgtcaggggggcggagcctatggaaaaacgccagcaacgcggcctttttacggttcctggccttttgctggccttttgctcacatgtaatgtgagttagctcactcattaggcaccccaggctttacactttatgcttccggctcgtatgttgtgtggaattgtgagcggataacaatttcacacaggaaacagctatgaccatgattacgccaagctacgtaatacgactcactagtgggcagatcttcgaatgcatcgcgcgctctagcatcatatgttggatataaatttagatttgacctattatactacatcaacacacttgcacaacatatactatttccgcccaagcaagtgttagatatgacgtatgaattgatacagttcatatggaatacgagagataagcaattaatatggcacaaaaacaaacctgttaagccaacaaataaattagttgttataagcgatgcctcgtatggtaaccaaccgtattataaatcacaaattggcaacatatatttacttaatggaaaagtaattggaggaaagtccaccaaggcttcattaacatgtacttcaactacggaagcagaaatacacgcaataagtgaatctgtcccattattaaataatctaagttacctgatacaagaactcgacaagaaaccaattaccaaaggattactaaccgacagtaaatctacaatcagtataattatatccaataatgaagagaaatttagaaacagattttttggtagtgcgatg

SEQ ID NO: 79 - protein, 346 aa, Papaver somniferum
METVSKIDQQNQAKIWKQIYGFAESLVLKCAVQLEIAETLHNNVKPMSLSELASKLPVAQPVNEDRLFRIMRYLVHMELFKIDATTQKYSLAPPAKYLLRGWEKSMVDSILCINDKDFLAPWHHLGDGLTGNCDAFEKALGKSIWVYMSVNPEKNQLFNAAMACDTRLVTSALANECKSIFSDGISTLVDVGGGTGTAVKAISKAFPDIKCTIYDLPHVIADSPEIPNITKISGDMFKSIPSADAIFMKCILHDWNDDECIQILKRCKEALPKGGKVIIVDVVIDMDSTHPYAKIRLTLDLDMMLNTGGKERTKEEWKTLFDAAGFASHKVTQISAVQSVIEAYPY

SEQ ID NO: 80 - DNA, 1041 bp, Papaver somniferum
  source 1..1041: mol_type = other DNA
atggaaaccgtgtccaagatcgatcaacaaaatcaagctaagatctggaagcagatctacggttttgctgaatctttggttttgaagtgcgctgtgcaattggaaattgctgaaaccttgcataacaacgtcaagccaatgtctttgtctgaattggcttctaaattgccagttgctcaaccagttaatgaggataggttgttcagaatcatgagatacttagtccacatggaactgttcaagattgatgctactacccagaaatattctttggctccaccagctaaatacttgttgagaggttgggaaaagtccatggttgattctattttgtgcatcaacgacaaggattttttggctccttggcatcacttaggtgatggtttgactggtaattgtgatgcttttgaaaaggctttgggcaagtctatttgggtttacatgtctgttaacccagagaagaatcagttgtttaatgctgctatggcttgcgatacaagattggttacttctgctttggctaacgaatgcaagtccattttctctgatggtatctctaccttggttgatgttggtggtggtactggtactgctgttaaggctatttctaaggctttcccagatattaagtgcaccatctatgatttgccacatgttattgctgattccccagaaattccaaacatcaccaaaatctctggtgacatgtttaagtccattccatctgctgatgccattttcatgaagtgcattctgcatgattggaacgatgatgaatgcatccaaatcttgaagagatgcaaagaagccttgccaaaaggcggtaaagttatcattgtcgatgttgtcatcgacatggattctactcatccatacgctaagattagattgaccttggatttggacatgatgttgaacactggtggtaaagaaaggaccaaagaagaatggaaaaccttgtttgatgcagctggttttgcttctcataaggttactcaaatttccgccgttcaatctgttattgaagcctatccttactaa

SEQ ID NO: 81 - protein, 346 aa, Papaver somniferum; identical to SEQ ID NO: 79

SEQ ID NO: 82 - protein, 358 aa, Coptis japonica
MAVEAKQTKKAAIVELLKQLELGLVPYDDIKQLIRRELARRLQWGYKPTYEEQIAEIQNLTHSLRQMKIATEVETLDSQLYEIPIEFLKIMNGSNLKGSCCYFKEDSTTLDEAEIAMLDLYCERAQIQDGQSVLDLGCGQGALTLHVAQKYKNCRVTAVTNSVSQKEYIEEESRRRNLLNVEVKLADITTHEMAETYDRILVIELFEHMKNYELLLRKISEWISKDGLLFLEHICHKTFAYHYEPLDDDDWFTEYVFPAGTMIIPSASFFLYFQDDVSVVNHWTLSGKHFSRTNEEWLKRLDANLDVIKPMFETLMGNEEEAVKLINYWRGFCLSGMEMFGYNNGEEWMASHVLFKKK

SEQ ID NO: 83 - DNA, 1077 bp, Coptis japonica
  source 1..1077: mol_type = other DNA
atggctgttgaagctaagcaaactaagaaggctgctatcgttgagttgttgaagcaattggaattgggtttagttccatacgacgacatcaagcaattgatcagaagagaattggctagaagattgcaatggggttataagccaacttacgaagaacaaattgccgagattcaaaacttgacccactctttgagacaaatgaagattgctactgaagtcgaaaccttggattctcagttgtacgaaattccaatcgagttcctgaagatcatgaacggttctaatttgaagggttcttgctgctacttcaaagaagattctaccactttggatgaagccgaaattgctatgttggacttgtattgtgaaagggcccaaattcaagatggtcaatctgttttggacttaggttgtggtcaaggtgctttgactttacatgttgctcaaaagtacaagaactgcagagttactgctgttaccaactccgtttctcaaaaagagtacatcgaagaagaatccagaaggcgtaatttgttgaacgttgaagttaagttggccgatattactactcacgaaatggctgaaacctacgatagaattttggtcatcgagttgttcgagcacatgaagaattacgagttgctgttgagaaagatctccgaatggatttctaaggacggtttgttgttcttggaacatatttgccataagaccttcgcctatcattacgaaccattggatgatgatgattggttcaccgaatatgtttttccagccggtactatgattattccatccgcttcattctttctgtacttccaagatgatgtttccgttgttaatcactggaccttgtctggtaaacacttctctagaactaacgaagaatggttgaagagattggatgccaacttggatgttatcaagccaatgttcgaaactttgatgggtaatgaagaagaagccgtcaagctgattaactattggagaggtttttgcttgtccggcatggaaatgtttggttacaacaatggtgaagaatggatggcctctcatgttttgttcaagaagaagtaa

SEQ ID NO: 84 - protein, 350 aa, Papaver somniferum
MQLKAKEELLRNMELGLIPDQEIRQLIRVELEKRLQWGYKETHEEQLSQLLDLVHSLKGMKMATEMENLDLKLYEAPMEFLKIQHGSNMKQSAGYYTDESTTLDEAEIAMLDLYMERAQIKDGQSVLDLGCGLGAVALFGANKFKKCQFTGVTSSVEQKDYIEGKCKELKLTNVKVLLADITTYETEERFDRIFAVELIEHMKNYQLLLKKISEWMKDDGLLFVEHVCHKTLAYHYEPVDAEDWYTNYIFPAGTLTLSSASMLLYFQDDVSVVNQWTLSGKHYSRSHEEWLKNMDKNIVEFKEIMRSITKTEKEAIKLLNFWRIFCMCGAELFGYKNGEEWMLTHLLFKK

SEQ ID NO: 85 - protein, 488 aa, Eschscholzia californica
MEVVTVALIAVIISSILYLLFGGSGHKNLPPGPKPWPIVGNLLQLGEKPHAQFAELAQTYGDIFTLKMGTETVVVASTSSAASEILKTHDRILSARYVFQSFRVKGHVENSIVWSDCTETWKNLRKVCRTELFTQKMIESQAHVREKKCEEMVEYLKKKQGEEVKIVEVIFGTLVNIFGNLIFSQNIFELGDPNSGSSEFKEYLWRMLELGNSTNPADYFPMLGKFDLFGQRKEVAECLKGIYAIWGAMLQERKLAKKVDGYQSKNDFVDVCLDSGLNDYQINALLMELFGAGTETSASTIEWAMTELTKNPKITAKIRSEIQTVVGERSVKESDFPNLPYLEATVKETLRLHPPTPLLLPRRALETCTILNYTIPKDCQIMVNAWGIGRDPKTWTDPLTFSPERFLDSSVDFRGNDFSLIPFGAGRRICPGLPIANQFIALLVATFVQNLDWCLPNGMSVDHLIVEEKFGLTLQKEPPLFIVPKSRV

SEQ ID NO: 86 - DNA, 1467 bp, Eschscholzia californica
  source 1..1467: mol_type = other DNA
atggaagttgttaccgttgctttgatcgccgttattatctcttctatcctgtacttgttgttcggtggttctggtcataagaatttgccaccaggtccaaaaccatggccaatagttggtaatttgttgcagttgggtgaaaagccacatgctcaatttgctgaattggctcaaacttacggtgatatcttcactttgaagatgggtactgaaaccgttgttgttgcttctacttcttctgctgcttccgaaattttgaaaacccacgatagaattttgtccgccagatacgttttccagtcttttagagttaagggtcacgtcgaaaattccatagtttggtctgattgcactgaaacctggaagaatttgagaaaggtatgtagaactgagctgttcacccaaaagatgattgaatctcaagctcacgtcagggaaaaaaagtgtgaagaaatggtcgagtacctgaagaaaaagcaaggtgaagaagttaagatcgtcgaagttatcttcggtactttggttaacattttcggcaacttgatcttctcccagaacatctttgaattgggtgatccaaattctggctcctctgagtttaaagaatatctgtggcgtatgttggaattgggcaattctactaatccagctgattactttccaatgttgggcaagtttgatttgttcggtcaaagaaaagaagtcgccgaatgtttgaaaggtatctatgctatttggggtgccatgttgcaagaaagaaaattggctaaaaaggtcgacggttaccaatccaagaatgatttcgttgatgtctgcttggattccggtttgaatgattaccaaatcaacgctctgctgatggaattatttggtgctggtacagaaacttccgcttctactattgaatgggctatgactgaattgacgaagaacccaaagattaccgccaagattagatccgaaatccaaactgttgttggtgagagatctgtcaaagaatctgatttcccaaatctgccatacttggaagctactgtgaaagaaactttgagattgcatccaccaacaccattgctattgccaagaagggctttagaaacttgcaccattttgaactacaccattccaaaggattgccagattatggttaatgcttggggtattggtagagatccaaaaacttggactgatccattgacattctctccagagagattcttagattcctccgttgattttagaggcaacgacttttccttgattccattcggtgcaggtagaagaatatgtccaggtttgccaattgctaaccagttcattgctttgttggttgctactttcgttcaaaacttagattggtgtttgccaaacggtatgtccgttgatcatttgatcgttgaagaaaagttcggtctgaccttgcaaaaagaaccacctttgtttatcgtcccaaagtccagagtttga

SEQ ID NO: 87 - protein, 488 aa, Eschscholzia californica
MEVVTVALIAVIISSILYLLFGSSGHKNLPPGPKPWPIVGNLLQLGEKPHAQFAELAQTYGDIFTLKMGTETVVVASTSSAASEILKTHDRILSARYVFQSFRVKGHVENSIVWSDCTETWKNLRKVCRTELFTQKMIESQAHVREKKCEEMVEYLMKKQGEEVKIVEVIFGTLVNIFGNLIFSQNIFELGXPNSGSSEFKEYLWRMLELGNSTNPADYFPMLGKFDLFGQRKEVAECLKGIYAIWGAMLQERKLAKKVDGYQSKNDFVDVCLDSGLNDYQINALLMELFGAGTETSASTIEWAMTELTKNPKITAKLRSELQTVVGERSVKESDFPNLPYLEATVKETLRLHPPTPLLLPRRALETCTILNYTIPKDCQIMVNAWGIGRDPKTWIDPLTFSPERFLNSSVDFRGNDFSLIPFGAGRRICPGLPIANQFIALLVATFVQNLDWCLPNGMSVDHLIVEEKFGLTLQKEPPLFIVPKSRV

SEQ ID NO: 88 - DNA, 1467 bp, Eschscholzia californica; identical to SEQ ID NO: 86
  source 1..1467: mol_type = other DNA

SEQ ID NO: 89 - protein, 350 aa, Coptis japonica
MAFHGKDDVLDIKAQAHVWKIIYGFADSLVLRCAVELGIVDIIDNNNQPMALADLASKLPVSDVNCDNLYRILRYLVKMEILRVEKSDDGQKKYALEPIATLLSRNAKRSMVPMILGMTQKDFMTPWHSMKDGLSDNGTAFEKAMGMTIWEYLEGHPDQSQLFNEGMAGETRLLTSSLISGSRDMFQGIDSLVDVGGGNGTTVKAISDAFPHIKCTLFDLPHVIANSYDLPNIERIGGDMFKSVPSAQAIILKLILHDWNDEDSIKILKQCRNAVPKDGGKVIIVDVALDEESDHELSSTRLILDIDMLVNTGGKERTKEVWEKIVKSAGFSGCKIRHIAAIQSVIEVFP

SEQ ID NO: 90 - DNA, 1053 bp, Coptis japonica
  source 1..1053: mol_type = other DNA
atggccttccacggtaaggatgatgttttggatattaaggctcaagcccatgtttggaagattatctatggtttcgctgacagcttggttttgagatgtgctgttgaattgggtatcgttgatatcatcgacaacaacaatcaacctatggctttggctgatttggcttctaaattgccagtttctgatgttaactgcgacaacttgtacagaatcttgagatacttggtcaagatggaaatcttgagggttgaaaagtctgatgacggtcaaaaaaagtacgccttggaacctattgctaccttgttgtctagaaacgctaagagatcaatggtcccaatgattttgggtatgacacaaaaggattttatgaccccatggcactctatgaaggatggtttgtctgataatggtactgctttcgaaaaagctatgggcatgactatttgggaatacttggaaggtcatccagatcaatctcagttgtttaatgaaggtatggctggtgaaactaggttgttgacttcttctttgatctccggttctagagatatgttccaaggtatcgattctttggttgatgttggtggtggtaatggtacaactgttaaggctatttctgatgctttcccacatattaagtgcaccttgtttgatttgccacatgttattgccaactcctacgatttgccaaacattgaaagaatcggtggtgacatgtttaagtctgttccatctgctcaagccatcatcttgaaattgatattgcacgattggaacgacgaggacagcattaagattttgaagcaatgcagaaacgccgttccaaaagatggtggtaaagttatcattgtcgatgttgccttggatgaagaatccgatcatgaattgtcatccaccagattgattttggacatcgatatgttggttaacaccggtggcaaagaaagaacaaaagaagtttgggaaaagatcgttaagtccgctggtttttctggttgcaagattagacatattgccgccattcaatccgtcattgaagtgttcccttaa

SEQ ID NO: 91 - protein, 357 aa, Papaver somniferum
MGSLDAKPAAATQEVSIKDQAQLWNIIYGFADSLVLRCAVEIGIADIIKNNDGAITLAQLAAKLPITNVSSDYLYRMVRYLVHLNIIEQETCNGGVEKVYSLKPVGTLLLRDAERSMVPMILGMTQKDFMVSWHFMKEGLGNGSTTAFEKGMGMDIWKYLEGNPDQSQLFNEGMAGETRLLTKTLIEDCRDTFQGLDSLVDIGGGNGTTIKAIYEAFPHIKCTLYDLPHVVANSHDLPNIEKVPGDMFKSVPSAQAILLKLILHDWTDEECVNILKKCKEAIPKETGKVIIVDVALEEESNHELTKTRLILDIDMLVNTGGRERTADDWENLLKRAGFRSHKIRPIRAIQSVIEAFP

SEQ ID NO: 92 - protein, 887 aa, Papaver bracteatum
MELQYFSYFQPTSSVVALLLALVSILFSVVVLRKTFSNNYSSPASSTETAVLCHQRQQSCALPISGLLHVFMNKNGLIHVTLGNMADKYGPIFSFPTGSHRTLVVSSWEMVKECFTGNNDTFFSNRPIPLAFKIIFYAGGVDSYGLALVPYGKYWRELRKICVHNLLSNQQLLKFRHLIISQVDTSFNKLYELCKNSEDNQGMVRMDDWLAQLSFSVIGRIVCGFQSDPKTGAPSRVEQFKEAINEASYFMSTSPVSDNVPMLGWIDQLTGLTRNMTHCGKKLDLVVESIINDHRQKRRFSRTKGGDEKDDEQDDFIDICLSIMEQPQLPGNNNPPKIPIKSIVLDMIGGGTDTTKLTTIWTLSLLLNNPHVLDKAKQEVDAHFLTKRRSTNDAAVVDFDDIRNLVYIQAIIKESMRLYPASPVVERLSGEDCVVGGFHVPAGTRLWVNVWKMQRDPNVWADPMVFRPERFLSHGQKKMVDVRGKNYELLPFGAGRRICPGISFSLDLMQLVLTRLILEFEMKSPSGKVDMTATPGLMSYKVVPLDILLTHRRIKSCVQLASSERDMESSGVPVITLRSGKVMPVLGMGTFEKAGKGSERERLAILKAIEVGYRYFDTAAAYETEEVLGEAIAEALQLGLIKSRDELFISSMLWCTDAHPDRVLLALQNSLRNLKLEYVDLYMLPFPASLKPGKITMDIPEEDICPMDYRSVWSAMEECQNLGLTKSIGVSNFSCKKLEELMATANIPPAVNQVEMSPAFQQKKLREYCNANNILVSAVSILGSNGTPWGSNAVLGSEVLKKIAMAKGKSVAQVSMRWVYEQGASLVVKSFSEERLRENLNIFDWQLTKEDNEKIGEIPQCRILSAYFLVSPKGPFKSQEELWDDKA

SEQ ID NO: 93 - DNA, 2664 bp, Papaver bracteatum
  source 1..2664: mol_type = other DNA
atggaattgcaatacttctcctacttccaacctacctcttctgttgttgctttgttgttggcattggtcagtatcttgttttccgttgttgttttgagaaagaccttctccaacaactattcttctccagcttcttctactgaaaccgctgttttgtgtcatcaaagacaacaatcttgcgccttgccaatttctggtttgttgcatgttttcatgaacaagaacggtttgatccatgttaccttgggtaatatggctgataagtacggtccaattttctcttttccaaccggttctcatagaaccttggttgtttcttcttgggaaatggtcaaagaatgtttcaccggtaacaacgataccttctttagtaacagaccaattccattggccttcaagattattttctatgccggtggtgttgactcttatggtttggctttggttccatacggtaaatattggagagaattgagaaagatctgcgtccacaacttgttgtccaatcaacaattattgaagttcagacacttgatcatctcccaagttgatacctccttcaacaagttatacgaattgtgcaagaactccgaagataatcaaggtatggttagaatggatgattggttggctcaattgtccttctcagttattggtagaatcgtttgcggtttccaatctgatccaaaaactggtgctccatctagagtcgaacaattcaaagaagctattaacgaagcctcctacttcatgtctacttctccagtttctgataacgttccaatgttgggttggatcgatcaattgactggtttgactagaaacatgacccattgtggtaagaagttggatttggttgtcgaatccatcatcaacgatcacagacaaaagagaagattctccagaacaaaaggtggtgacgaaaaggatgatgaacaagatgatttcatcgacatctgcttgtccattatggaacaaccacaattgccaggtaacaacaatccaccaaaaatcccaatcaagtccatcgttttggatatgattggtggtggtactgataccactaagttgactactatttggaccttgtccttgttgttgaacaacccacatgttttggacaaggctaaacaagaagttgacgctcatttcttgaccaagagaagaagtacaaacgacgctgctgttgttgatttcgatgacattagaaacttggtctacatccaagccattatcaaagaatccatgagattatacccagcctctccagttgttgaaagattgtctggtgaagattgtgttgttggtggttttcatgttccagctggtactagattgtgggttaatgtttggaagatgcaaagagatcctaacgtttgggctgatccaatggtttttagaccagaaagattcttgtcccacggtcaaaaaaagatggttgatgttagaggtaagaactacgaattattgccatttggtgccggtagaagaatttgtccaggtatttctttctccttggatttgatgcaattggtcttgaccagattgatcttggaattcgaaatgaagtctccatccggtaaggttgatatgactgctactccaggtttgatgtcttacaaagttgttccattggacatcttgttgacccatagaagaatcaagtcttgcgttcaattggcctcttctgaaagagatatggaatcttctggtgttccagttatcactttgagatctggtaaagttatgccagttttgggtatgggtacttttgaaaaagctggtaagggttccgaaagagaaagattggctattttgaaggccatcgaagttggttacagatactttgatactgctgctgcttacgaaaccgaagaagttttaggtgaagctattgctgaagccttgcaattgggtttaatcaagtcaagagatgaattattcatttcctccatgttgtggtgtactgatgctcatccagatagagttttgttggcattgcaaaactcattgagaaacttgaagttggaatacgtcgacttgtacatgttgccatttccagcttcattgaagccaggtaagattaccatggatatcccagaagaagatatctgcccaatggattatagatctgtttggtctgctatggaagaatgccaaaatttgggtttgaccaagtccattggtgtctctaatttctcctgcaaaaagttggaagaattgatggctactgctaacattccaccagctgtaaatcaagttgaaatgtctccagctttccaacaaaagaagttgagagaatactgcaacgctaacaacattttggtttccgccgtttctattttgggttctaatggtactccatggggttcaaatgctgttttaggttctgaagtcttgaaaaagattgctatggccaagggtaaatccgttgctcaagtttcaatgagatgggtttatgaacaaggtgcttccttggttgttaagtcctttagtgaagaaagattaagagaaaacttgaacatcttcgactggcaattgaccaaagaagataacgaaaagatcggtgaaatcccacaatgcagaattttgtctgcttacttcttggttagtccaaagggtccattcaagtctcaagaagaattatgggatgataaggcttaa

SEQ ID NO: 94 - protein, 310 aa, Streptomyces tsukubaensis
MSATTNTTSADGVAGPGGPGGRPPVTVLGLGQMGAAIAGALLAAGHPVTVWNRTPGKAAPLVEQGAVLAGSVAEAVAASPLVLSVVLDYPALYGILDPEPDALKGRALVNLTTGTPEQAGEAAEWAARHGVDYLDGAIMTTPPGVGTREVMFLYSGDRAVFDAHHAALDVLGEPLHLGTEPGLAALYDVNLLGLMWATMAGWLHGTAVVGAEGTRAVDFTEVAIRWLGTVNNFIRRYAAQVDEGVYPGDDATVDVQIAVVEHQLHAAEARGVDNRLPELLKTLMLEANAKGHGQDSFGSVVEVLRKGARR

SEQ ID NO: 95 - DNA, 933 bp, Streptomyces tsukubaensis
  source 1..933: mol_type = other DNA
atgtccgctactaccaacactacttctgctgatggtgttgctggtccaggtggtcctggtggtagaccacctgttactgttttaggtttgggtcaaatgggtgctgctattgctggtgctttgttggctgctggtcatccagttacagtttggaatagaactccaggtaaagctgctccattggttgaacaaggtgctgttttggctggttctgttgctgaagctgttgctgcttctccattagttttgtctgttgttttggattacccagccttgtacggtattttggatccagaaccagatgctttgaaaggtagagctttggttaatttgactaccggtactccagaacaagctggtgaagctgctgaatgggctgctagacatggtgttgattatttggatggtgctattatgactactccaccaggtgttggtactagagaagttatgttcttgtactctggtgatagagctgttttcgatgctcatcatgctgctttggatgttttgggtgaaccattgcatttgggtactgaaccaggtttggctgcattatacgatgttaatttgttgggtttgatgtgggctactatggctggttggttgcatggtactgctgttgttggtgcagaaggtacaagagctgttgattttactgaagttgccattagatggttgggtacagttaacaacttcatcagaagatacgctgcccaagttgatgaaggtgtttatccaggtgatgatgctactgttgatgttcaaattgccgttgttgaacaccaattgcatgctgctgaagccagaggtgttgataatagattgccagaactgctgaaaaccttgatgttggaagctaatgctaaaggtcatggtcaagattcttttggttctgtcgttgaagttttgagaaagggtgctagaagataa

SEQ ID NO: 96 - protein, 901 aa, Papaver somniferum
MELQYISYFQPTSSVVALLLALVSILSSVVVLRKTFLNNYSSSPASSTKTAVLSHQRQQSCALPISGLLHIFMNKNGLIHVTLGNMADKYGPIFSFPTGSHRTLVVSSWEMVKECFTGNNDTAFSNRPIPLAFKTIFYACGGIDSYGLSSVPYGKYWRELRKVCVHNLLSNQQLLKFRHLIISQVDTSFNKLYELCKNSEDNHGNYTTTTTTAAGMVRIDDWLAELSFNVIGRIVCGFQSGPKTGAPSRVEQFKEAINEASYFMSTSPVSDNVPMLGWIDQLTGLTRNMKHCGKKLDLVVESIINDHRQKRRFSRTKGGDEKDDEQDDFIDICLSIMEQPQLPGNNNPSQIPIKSIVLDMIGGGTDTTKLTTIWTLSLLLNNPHVLDKAKQEVDAHFRTKRRSTNDAAAAVVDFDDIRNLVYIQAIIKESMRLYPASPVVERLSGEDCVVGGFHVPAGTRLWANVWKMQRDPKVWDDPLVFRPDRFLSDEQKMVDVRGQNYELLPFGAGRRVCPGVSFSLDLMQLVLTRLILEFEMKSPSGKVDMTATPGLMSYKVIPLDILLTHRRIKPCVQSAASERDMESSGVPVITLGSGKVMPVLGMGTFEKVGKGSERERLAILKAIEVGYRYFDTAAAYETEEVLGEAIAEALQLGLVKSRDELFISSMLWCTDAHADRVLLALQNSLRNLKLEYVDLYMLPFPASLKPGKITMDIPEEDICRMDYRSVWAAMEECQNLGFTKSIGVSNFSCKKLQELMATANIPPAVNQVEMSPAFQQKKLREYCNANNILVSAISVLGSNGTPWGSNAVLGSEVLKKIAMAKGKSVAQVSMRWVYEQGASLVVKSFSEERLRENLNIFDWELTKEDHEKIGEIPQCRILSAYFLVSPNGPFKSQEELWDDEA

SEQ ID NO: 97 - DNA, 2706 bp, Papaver somniferum
  source 1..2706: mol_type = other DNA
atggaactgcagtacatctcttacttccaacctacttcttctgttgttgctttgttgttggccttggtttccattttgtcatccgttgttgttctgagaaagaccttcttgaacaactactcttcatctccagcttcatctactaagactgctgttttgtctcaccaaagacaacaatcttgtgccttgccaatttctggtttgttgcatatcttcatgaacaagaacggtttgatccatgttaccttgggtaatatggctgataagtacggtccaattttctcttttccaaccggttctcatagaaccttggttgtttcttcttgggaaatggtcaaagaatgtttcaccggtaacaacgatactgccttttctaatagaccaattccattggctttcaagaccattttttacgcttgtggtggtatcgactcttacggtttatcttctgttccatacggtaaatactggcgtgaattgagaaaggtttgcgttcataacttgttgtctaaccagcagttgttgaagttcagacacttgatcatctctcaagttgacacctctttcaacaagttgtacgaattgtgcaagaactccgaagataaccatggtaattacactactactaccactacagctgctggtatggttagaattgatgattggttggctgagttgtccttcaacgttattggtagaatcgtttgcggttttcaatctggtccaaaaactggtgctccatctagagttgaacaattcaaagaagctatcaacgaggcctcctactttatgtctacttctccagtttctgataacgtcccaatgttaggttggatcgatcaattgactggtttgaccagaaatatgaagcactgtggtaagaagttggatttggttgtcgaatccatcatcaacgatcacagacaaaagagaagattctctaggacaaaaggtggtgacgaaaaggatgacgaacaagatgatttcatcgacatctgcttgtccattatggaacaaccacaattgccaggtaacaacaacccatctcaaattccaatcaagtccatcgttttggatatgattggtggtggtactgataccactaagttgactactatttggaccctgtccttgttgttgaacaacccacatgttttggacaaagctaagcaagaagttgacgctcatttcagaactaagagaaggtctactaatgatgctgctgcagctgttgttgatttcgatgatattagaaacctggtctacatccaggccattatcaaagaatccatgagattatatccagcctctccagttgtagaaagattgtctggtgaagattgtgttgttggtggttttcatgttccagctggtactagattgtgggctaatgtttggaaaatgcagagagatccaaaggtttgggatgatccattggtttttagacctgacagattcttgtccgacgaacaaaagatggttgatgtcagaggtcaaaattacgagttgttgccatttggtgctggtagaagagtttgtccaggtgtttctttttccttggatttgatgcaattggtcttgaccaggttgatcttggaattcgaaatgaagtctccatccggtaaggttgatatgactgctactccaggtttgatgtcctacaaagttatcccattggatatcttgttgacccacagaagaatcaaaccttgcgttcaatctgctgcttctgaaagagatatggaatcttctggtgttccagttatcactttaggttctggtaaagtcatgccagttttaggtatgggtactttcgaaaaagttggtaagggttccgaaagagagagattggctattttgaaggctatcgaagttggttacagatactttgatactgctgctgcttacgaaactgaagaggttttgggtgaagctattgctgaagctttacaattgggtctagtcaagtctagagatgagttgttcatctcttctatgttgtggtgtacagatgctcatgctgatagagttttgttagccttgcaaaactccttgaggaacttgaagttggaatacgttgacttgtacatgttgccttttccagcatctttgaagccaggtaagattactatggatatcccagaagaggatatctgcagaatggattatagatctgtttgggctgctatggaagaatgtcaaaatttgggtttcaccaagtctatcggtgtctctaatttctcctgcaaaaagttgcaagagttgatggctactgctaatattccaccagctgttaatcaagtcgaaatgtcaccagctttccagcagaaaaaattgagagaatactgtaacgctaacaacatcttggtttctgccatttctgttttgggttctaatggtactccatggggttcaaatgctgttttaggttcagaagtcttgaaaaagattgctatggccaagggtaaatccgttgctcaagtttcaatgaggtgggtttatgaacaaggtgcttctttggttgtgaagtcctttagcgaagaaaggttgagagaaaacttgaacatcttcgattgggagttgacgaaagaagatcacgaaaaaatcggtgaaatcccacaatgcagaattttgtctgcttacttcttggtgtctccaaatggtccattcaaatctcaagaggaattgtgggacgatgaagcttaa

SEQ ID NO: 98 - protein, 568 aa, Papaver somniferum
MELQYISYFQPTSSVVALLLALVSILSSVVVLRKTFLNNYSSSPASSTKTAVLSHQRQQSCALPISGLLHIFMNKNGLIHVTLGNMADKYGPIFSFPTGSHRTLVVSSWEMVKECFTGNNDTAFSNRPIPLAFKTIFYACGGIDSYGLSSVPYGKYWRELRKVCVHNLLSNQQLLKFRHLIISQVDTSFNKLYELCKNSEDNHGNYTTTTTTAAGMVRIDDWLAELSFNVIGRIVCGFQSGPKTGAPSRVEQFKEAINEASYFMSTSPVSDNVPMLGWIDQLTGLTRNMKHCGKKLDLVVESIINDHRQKRRFSRTKGGDEKDDEQDDFIDICLSIMEQPQLPGNNNPSQIPIKSIVLDMIGGGTDTTKLTTIWTLSLLLNNPHVLDKAKQEVDAHFRTKRRSTNDAAAAVVDFDDIRNLVYIQAIIKESMRLYPASPVVERLSGEDCVVGGFHVPAGTRLWANVWKMQRDPKVWDDPLVFRPDRFLSDEQKMVDVRGQNYELLPFGAGRRVCPGVSFSLDLMQLVLTRLILEFEMKSPSGKVDMTATPGLMSYKVIPLDILLTHRRI

SEQ ID NO: 99 - DNA, 1707 bp, Papaver somniferum
  source 1..1707: mol_type = other DNA
atggaactgcagtacatctcttacttccaacctacttcttctgttgttgctttgttgttggccttggtttccattttgtcatccgttgttgttctgagaaagaccttcttgaacaactactcttcatctccagcttcatctactaagactgctgttttgtctcaccaaagacaacaatcttgtgccttgccaatttctggtttgttgcatatcttcatgaacaagaacggtttgatccatgttaccttgggtaatatggctgataagtacggtccaattttctcttttccaaccggttctcatagaaccttggttgtttcttcttgggaaatggtcaaagaatgtttcaccggtaacaacgatactgccttttctaatagaccaattccattggctttcaagaccattttttacgcttgtggtggtatcgactcttacggtttatcttctgttccatacggtaaatactggcgtgaattgagaaaggtttgcgttcataacttgttgtctaaccagcagttgttgaagttcagacacttgatcatctctcaagttgacacctctttcaacaagttgtacgaattgtgcaagaactccgaagataaccatggtaattacactactactaccactacagctgctggtatggttagaattgatgattggttggctgagttgtccttcaacgttattggtagaatcgtttgcggttttcaatctggtccaaaaactggtgctccatctagagttgaacaattcaaagaagctatcaacgaggcctcctactttatgtctacttctccagtttctgataacgtcccaatgttaggttggatcgatcaattgactggtttgaccagaaatatgaagcactgtggtaagaagttggatttggttgtcgaatccatcatcaacgatcacagacaaaagagaagattctctaggacaaaaggtggtgacgaaaaggatgacgaacaagatgatttcatcgacatctgcttgtccattatggaacaaccacaattgccaggtaacaacaacccatctcaaattccaatcaagtccatcgttttggatatgattggtggtggtactgataccactaagttgactactatttggaccctgtccttgttgttgaacaacccacatgttttggacaaagctaagcaagaagttgacgctcatttcagaactaagagaaggtctactaatgatgctgctgcagctgttgttgatttcgatgatattagaaacctggtctacatccaggccattatcaaagaatccatgagattatatccagcctctccagttgtagaaagattgtctggtgaagattgtgttgttggtggttttcatgttccagctggtactagattgtgggctaatgtttggaaaatgcagagagatccaaaggtttgggatgatccattggtttttagacctgacagattcttgtccgacgaacaaaagatggttgatgtcagaggtcaaaattacgagttgttgccatttggtgctggtagaagagtttgtccaggtgtttctttttccttggatttgatgcaattggtcttgaccaggttgatcttggaattcgaaatgaagtctccatccggtaaggttgatatgactgctactccaggtttgatgtcctacaaagttatcccattggatatcttgttgacccacagaagaatctaa

SEQ ID NO: 100 - protein, 535 aa, Papaver rhoeas
MEYSDLQLFGFQPTSVVALLLALVSILLGVIAVSHHRAKPSCALPMIGLYHVFMNKTGLIHVTLGNMADKYGPIFSFPTGGHRALVVSSWEMAKECFTGDNDIVFSNRPMPLSFKIIFNAGGIDSAGLTQVPYGKYWRELRKICVHNLLSNQQLLKFRHLINSQVDTSFTKLYESCNKGNSGMVRMDDWLGELSFNVIGRIVCGFRSDTETSATSSAERFTVAIDEASRFMSIPAVSDTFPWLGWIDRLTGLIKDMKHHAEKLDLVVESIIEDHRQKRRFSRTKKGDENNTEDEQDDFIDICLSIMEQPELPGNNYARQMPIKSIIVDMIGGATDTTKLTTIWTLSLLLNNPHVLGKAKEEVDAHFGKKRSSTNGEVMVDFDDIRSLVYIQAIIKESMRLYPASPVVERLSSEDCVVGGFHVSAGTRLWVNVWKVQRDPEVWDDPSVFRPERFLSNEQKMVDVRGQDYELLPFGAGRRICPGVSFSLDLMHLVLTRLILEFEIKSPGGEVDMTATQGLMSYKVVPLDILLTRRML

SEQ ID NO: 101 - DNA, 1608 bp, Papaver rhoeas
  source 1..1608: mol_type = other DNA
atggaatactccgacttgcagttgtttggttttcaacctacttctgttgttgctttgttgttggccttggtttctattttgttgggtgttattgccgtttctcatcatagagctaaaccatcttgtgccttgccaatgattggtctgtatcatgttttcatgaacaagaccggtttgatccatgttactttgggtaatatggctgataagtacggtccaattttctcttttccaactggtggtcatagagccttggttgtttcttcttgggaaatggctaaagaatgcttcactggtgataacgacatcgtgttttctaatagaccaatgccactgtccttcaagattattttcaatgccggtggtattgattctgctggtttgactcaagttccatacggtaaatattggagggaattgagaaagatctgcgtccataacttgttgtccaatcaacagttgttgaagttcaggcacttgatcaactctcaagttgatacttctttcaccaagttgtacgagtcttgtaacaagggtaattccggtatggttagaatggatgattggttgggtgaattgtctttcaacgttatcggtagaatcgtttgcggttttagatctgatactgaaacttctgctacctcttctgctgaaagattcactgttgctattgatgaagcctccagattcatgtctattccagctgtttctgatactttcccatggttaggttggattgatagattgacaggtttgatcaaggatatgaagcaccatgctgaaaagttggatttggttgtggaatccatcatcgaagatcacagacaaaagagaagattctccaggacaaaaaagggtgacgaaaacaacactgaagatgaacaggatgatttcatcgacatctgcttgtccattatggaacaaccagaattgccaggtaacaactatgctagacaaatgccaatcaagtccattatcgttgatatgattggtggtgctactgacactactaagttgactactatttggaccctgtccttgttgttgaacaatccacatgttttgggtaaagccaaagaagaagttgacgctcattttggcaagaaaagatcttctaccaacggtgaagttatggttgatttcgatgacatcagatccttggtttacattcaggccatcatcaaagaatccatgagattatatccagcctctccagttgtcgaaagattgtcatctgaagattgtgttgttggtggtttccatgtttcagctggtactagattgtgggttaatgtttggaaggttcaaagagatcctgaagtttgggatgatccatctgtttttagaccagaaaggttcttgtccaacgaacaaaagatggttgatgttagaggtcaagactatgagttgttgccatttggtgcaggtagaagaatttgtccaggtgtttctttctccttggatttgatgcatttggtcttgaccagattgatcttggaattcgagattaagtctccaggtggtgaagttgacatgactgctactcaaggtttgatgtcttacaaggttgtcccattggatatcttgttgaccagaagaatgctgtaa

SEQ ID NO: 102 - protein, 551 aa, Artificial
MMKKSLHFFYDQPVSVSTLLLILLVTFSPIIYYIQKKKQNSTSSSRTGTIAASLPEASGAWPVIGHIHHFMKENELTHVTLGNMADKYGPIFSLRFGSHKTLVVSSWEMVKECFTGNNDTAFSNRPIPLAFKTIFYACGGIDSYGLSSVPYGKYWRELRKVCVHNLLSNQQLLKFRHLIISQVDTSFTKLYESCNKGNSGMVRMDDWLGELSFNVIGRIVCGFRSDTETSATSSAERFTVAINEASYFMSTSPVSDNVPMLGWIDQLTGLTRNMKHCGKKLDLVVESIINDHRQKRRFSRTKGGDEKDDEQDDFIDICLSIMEQPQLPGNNNPSQIPIKSIVLDMIGGGTDTTKLTTIWTLSLLLNNPHVLGKAKEEVDAHFGKKRSSTNGEVMVDFDDIRSLVYIQAIIKESMRLYPASPVVERLSGEDCVVGGFHVPAGTRLWANVWKMQRDPKVWDDPLVFRPDRFLSDEQKMVDVRGQNYELLPFGAGRRVCPGVSFSLDLMQLVLTRLILEFEMKSPSGKVDMTATPGLMSYKVIPLDILLTHRRI

SEQ ID NO: 103 - DNA, 1656 bp, Artificial
  source 1..1656: mol_type = other DNA
atgatgaagaagtccttgcacttcttctacgatcaaccagtttctgtttctaccctgttgttgattttgttggttaccttctctcccatcatctactacatccaaaagaagaagcaaaactccacctcttcatctagaactggtactattgctgcttctttgcctgaagcttctggtgcttggccagttattggtcatattcatcatttcatgaaagaaaacgagttgacccatgttaccttgggtaatatggctgataagtacggtccaatcttctcattgagattcggttctcataagaccttggttgtttcttcttgggaaatggtcaaagaatgtttcaccggtaacaacgatactgccttttctaatagaccaattccattggctttcaagaccattttttacgcttgtggtggtatcgactcttacggtttatcttctgttccatacggtaaatactggcgtgaattgagaaaggtttgcgttcataacttgttgtctaaccagcagttgttgaagttcagacacttgatcatctctcaagttgatacctctttcaccaagttgtacgaatcttgtaacaagggtaactccggtatggttagaatggatgattggttgggtgaattgtccttcaacgttattggtagaatcgtttgcggtttcagatccgatacagaaacttctgctacttcttctgctgaaagattcaccgttgctattaacgaagcttcctacttcatgtctacttctccagtctctgataacgttccaatgttaggttggatcgatcaattgactggtttgaccagaaatatgaagcactgtggtaagaagttggatttggttgtcgaatccatcatcaacgatcacagacaaaagagaagattctctaggacaaaaggtggtgacgaaaaggatgatgaacaagatgatttcatcgacatctgcctgtccattatggaacaaccacaattgccaggtaacaacaacccatctcaaattccaatcaagtccatcgttttggatatgattggtggtggtactgataccactaagttgactactatttggaccctgtctctgttattgaacaacccacatgttttgggtaaagccaaagaagaggttgacgctcattttggcaaaaagagatcttctacaaacggtgaagttatggttgatttcgacgacattagatccttggtttacattcaggccattatcaaagaatccatgagattatatccagcctctccagttgtagaaagattgtctggtgaagattgtgttgttggtggttttcatgttccagctggtactagattgtgggctaatgtttggaaaatgcagagagatccaaaggtttgggatgatccattggtttttagaccagacagattcttgtccgacgaacaaaagatggttgatgtcagaggtcaaaattacgagttgttgccatttggtgctggtagaagagtttgtccaggtgtttctttttccttggatttgatgcaattggtcttgacccgtttgatcttggaattcgaaatgaagtctccatccggtaaggttgatatgactgctactccaggtttgatgtcctacaaagttatcccattggatatcttgttgacccacagaagaatctaa

SEQ ID NO: 104 - protein, 551 aa, Artificial
MMKKSLHFFYDQPVSVSTLLLILLVTFSPIIYYIQKKKQNSTSSSRTGTIAASLPEASGAWPVIGHIHHFMKENELTHVTLGNMADKYGPIFSLRFGSHKTLVVSSWEMVKECFTGNNDTAFSNRPIPLAFKTIFYACGGIDSYGLSSVPYGKYWRELRKVCVHNLLSNQQLLKFRHLINSQVDTSFTKLYESCNKGNSGMVRMDDWLGELSFNVIGRIVCGFRSDTETSATSSAERFTVAIDEASRFMSIPAVSDNVPMLGWIDQLTGLTRNMKHCGKKLDLVVESIINDHRQKRRFSRTKGGDEKDDEQDDFIDICLSIMEQPQLPGNNNPSQIPIKSIVLDMIGGGTDTTKLTTIWTLSLLLNNPHVLGKAKEEVDAHFGKKRSSTNGEVMVDFDDIRSLVYIQAIIKESMRLYPASPVVERLSGEDCVVGGFHVPAGTRLWANVWKMQRDPKVWDDPLVFRPDRFLSDEQKMVDVRGQNYELLPFGAGRRVCPGVSFSLDLMQLVLTRLILEFEMKSPSGKVDMTATPGLMSYKVIPLDILLTHRRI

SEQ ID NO: 105 - DNA, 1656 bp, Artificial
  source 1..1656: mol_type = other DNA
atgatgaagaagtccttgcacttcttctacgatcaaccagtttctgtttctaccctgttgttgattttgttggttaccttctctcccatcatctactacatccaaaagaagaagcaaaactccacctcttcatctagaactggtactattgctgcttctttgcctgaagcttctggtgcttggccagttattggtcatattcatcatttcatgaaagaaaacgagttgacccatgttaccttgggtaatatggctgataagtacggtccaatcttctcattgagattcggttctcataagaccttggttgtttcttcttgggaaatggtcaaagaatgtttcaccggtaacaacgatactgccttttctaatagaccaattccattggctttcaagaccattttttacgcttgtggtggtatcgactcttacggtttatcttctgttccatacggtaaatactggcgtgaattgagaaaggtttgcgttcataacttgttgtctaaccagcagttgttgaagttcagacacttgatcaactctcaagttgatacctctttcaccaagttgtacgaatcttgtaacaagggtaactccggtatggttagaatggatgattggttgggtgaattgtccttcaacgttattggtagaatcgtttgcggtttcagatccgatacagaaacttctgctacttcttctgctgaaagattcaccgttgctattgatgaagcttccagattcatgtctattccagctgtttctgataacgtcccaatgttaggttggatcgatcaattgactggtttgaccagaaatatgaagcactgtggtaagaagttggatttggttgtcgaatccatcatcaacgatcacagacaaaagagaagattctctaggacaaaaggtggtgacgaaaaggatgatgaacaagatgatttcatcgacatctgcctgtccattatggaacaaccacaattgccaggtaacaacaacccatctcaaattccaatcaagtccatcgttttggatatgattggtggtggtactgataccactaagttgactactatttggaccctgtctctgttattgaacaacccacatgttttgggtaaagccaaagaagaggttgacgctcattttggcaaaaagagatcttctacaaacggtgaagttatggttgatttcgacgacattagatccttggtttacattcaggccattatcaaagaatccatgagattatatccagcctctccagttgtagaaagattgtctggtgaagattgtgttgttggtggttttcatgttccagctggtactagattgtgggctaatgtttggaaaatgcagagagatccaaaggtttgggatgatccattggtttttagaccagacagattcttgtccgacgaacaaaagatggttgatgtcagaggtcaaaattacgagttgttgccatttggtgctggtagaagagtttgtccaggtgtttctttttccttggatttgatgcaattggtcttgacccgtttgatcttggaattcgaaatgaagtctccatccggtaaggttgatatgactgctactccaggtttgatgtcctacaaagttatcccattggatatcttgttgacccacagaagaatctaa

SEQ ID NO: 106 - protein, 553 aa, Artificial
MMKKSLHFFYDQPVSVSTLLLILLVTFSPIIYYIQKKKQNSTSSSRTGTIAASLPEASGAWPVIGHIHHFMKENELTHVTLGNMADKYGPIFSLRFGSHKTLVVSSWEMVKECFTGNNDTAFSNRPIPLAFKTIFYACGGIDSYGLSSVPYGKYWRELRKICVHNLLSNQQLLKFRHLINSQVDTSFTKLYESCNKGNSGMVRMDDWLGELSFNVIGRIVCGFRSDTETSATSSAERFTVAIDEASRFMSIPAVSDTFPWLGWIDRLTGLIKDMKHHAEKLDLVVESIIEDHRQKRRFSRTKKGDENNKDDEQDDFIDICLSIMEQPQLPGNNNPSQIPIKSIVLDMIGGGTDTTKLTTIWTLSLLLNNPHVLDKAKQEVDAHFRTKRSSTNGEVMVDFDDIRSLVYIQAIIKESMRLYPASPVVERLSGEDCVVGGFHVPAGTRLWANVWKMQRDPKVWDDPLVFRPDRFLSDEQKMVDVRGQNYELLPFGAGRRVCPGVSFSLDLMQLVLTRLILEFEMKSPSGKVDMTATPGLMSYKVIPLDILLTHRRI

SEQ ID NO: 107 - DNA, 1662 bp, Artificial
  source 1..1662: mol_type = other DNA
atgatgaagaagtccttgcacttcttctacgatcaaccagtttctgtttctaccctgttgttgattttgttggttaccttctctcccatcatctactacatccaaaagaagaagcaaaactccacctcttcatctagaactggtactattgctgcttctttgcctgaagcttctggtgcttggccagttattggtcatattcatcatttcatgaaagaaaacgagttgacccatgttaccttgggtaatatggctgataagtacggtccaatcttctcattgagattcggttctcataagaccttggttgtttcttcttgggaaatggtcaaagaatgtttcaccggtaacaacgatactgccttttctaatagaccaattccattggctttcaagaccattttttacgcttgtggtggtatcgactcttacggtttatcttctgttccatacggtaaatactggcgtgaattgagaaagatctgcgttcataacttgttgtctaaccagcagttgttgaagttcagacacttgatcaactctcaagttgatacctctttcaccaagttgtacgaatcttgtaacaagggtaactccggtatggttagaatggatgattggttgggtgaattgtccttcaacgttattggtagaatcgtttgcggtttcagatccgatacagaaacttctgctacttcttctgctgaaagattcaccgttgctattgatgaagcttccagattcatgtctattccagctgtttctgatactttcccatggttaggttggattgatagattgaccggtttgatcaaggatatgaagcaccatgctgaaaagttggatttggttgtcgaatccatcatcgaagatcacagacaaaagagaagattctccaggacaaaaaagggtgacgaaaacaacaaggatgatgaacaagatgacttcatcgacatctgcttgtccattatggaacaaccacaattgccaggtaacaacaacccatctcaaattccaatcaagtccatcgttttggatatgattggtggtggtactgataccactaagttgactactatttggaccctgtctctgttattgaacaacccacatgttttggacaaagccaaacaagaagttgacgctcatttcaggactaagagatcttctactaatggtgaagttatggttgacttcgacgacattagatccttggtttacattcaggccatcatcaaagaatccatgagattatatccagcctctccagttgtagaaagattgtctggtgaagattgtgttgttggtggttttcatgttccagctggtactagattgtgggctaatgtttggaaaatgcagagagatccaaaggtttgggatgatccattggtttttagaccagacagattcttgtccgacgaacaaaagatggttgatgtcagaggtcaaaattacgagttgttgccatttggtgctggtagaagagtttgtccaggtgtttctttttccttggatttgatgcaattggtcttgaccagattgatcttggagttcgaaatgaagtctccatctggtaaggttgatatgactgctactccaggtttgatgtcctacaaagttatcccattggatatcttgttgacccacagaagaatctaa

SEQ ID NO: 108 - protein, 321 aa, Papaver somniferum
MESSGVPVITLGSGKVMPVLGMGTFEKVGKGSERERLAILKAIEVGYRYFDTAAAYETEEVLGEAIAEALQLGLVKSRDELFISSMLWCTDAHADRVLLALQNSLRNLKLEYVDLYMLPFPASLKPGKITMDIPEEDICRMDYRSVWAAMEECQNLGFTKSIGVSNFSCKKLQELMATANIPPAVNQVEMSPAFQQKKLREYCNANNILVSAISVLGSNGTPWGSNAVLGSEVLKKIAMAKGKSVAQVSMRWVYEQGASLVVKSFSEERLRENLNIFDWELTKEDHEKIGEIPQCRILSAYFLVSPNGPFKSQEELWDDEA

SEQ ID NO: 109 - DNA, 966 bp, Papaver somniferum
  source 1..966: mol_type = other DNA
atggaatcctctggtgttccagttatcactttaggttctggtaaagtcatgccagttttaggtatgggtactttcgaaaaagttggtaagggttccgaaagagaaagattggctattttgaaggccatcgaagttggttacagatactttgatactgctgctgcttacgaaactgaagaagttttgggagaagctattgctgaagccttgcaattgggtttagttaagtctagagatgagctgttcatctcctctatgttgtggtgtactgatgctcatgctgatagagttttgttggcattgcaaaacagcttgaggaacttgaagttggaatacgttgacttgtacatgttgccatttccagcttcattgaagccaggtaagattaccatggatattccagaagaggatatctgcagaatggattacagatcagtttgggctgctatggaagaatgtcaaaatttgggtttcaccaagtccatcggtgtttctaatttctcctgcaaaaagctgcaagaattgatggctactgctaatattccaccagccgttaatcaagttgaaatgtctccagctttccagcagaagaaattgagagaatactgtaacgccaacaacatcttggtttccgctatttctgttttgggttctaatggtactccatggggttcaaatgctgttttaggttccgaagtcttgaaaaagattgctatggctaagggtaaatccgttgctcaagtttctatgagatgggtttatgaacaaggtgcttccttggttgttaagtcctttagcgaagaacgtttgagggaaaacttgaacattttcgattgggagttgaccaaagaagatcacgaaaagattggtgaaattccacagtgcagaattttgtccgcttactttttggtttctccaaacggtccattcaagtctcaagaggaattgtgggatgatgaagcttaa

SEQ ID NO: 110 - protein, 326 aa, Papaver rhoeas
MDSSGVPVIPLSSGKGMPALALGTFETFGKGSSERQRSAFLKAIEVGYRYFDTGASYGTEEVLGEAIDEALQLGLIESREELFISSNLWCTDAHPDRVLLALQNSLRNLKLEYLDLYMIPFPISLKPGKIMEEITMDIPEDEMLPMDYKSVWAAMEECQDLGFTKSIGVSNFSCKKLQELMATANIPPAVNQVEMSPVFQQKKLREYCKANNILVSAVSVLGSNGTAWGSNQVMGSEVLKQIATDRGKSVAQISMRWVYEQGASLVVKSFNEVRMRENLNIFNWQLTKEDLEKISEIPQCRILTGDFLVSANGPFKSLQELWDDQV

SEQ ID NO: 111 - DNA, 981 bp, Papaver rhoeas
  source 1..981: mol_type = other DNA
atggactcttctggtgttccagttatcccattgtcatctggtaaaggtatgccagctttggctttgggtacttttgaaacttttggtaagggttcctccgaaagacaaagatctgcttttttgaaggccatcgaagttggttacagatactttgatactggtgcttcttatggtactgaagaggttttgggtgaagctattgatgaagctttacagttgggtttgatcgaatctagagaagagttgttcatctcctctaacttgtggtgtactgatgctcatccagatagagttttgttggccttgcaaaactctttgaggaacttgaagttggagtacttggacttgtacatgatcccatttccaatctcattgaagccaggtaagatcatggaagaaatcactatggatattccagaggacgaaatgttgccaatggattacaaatctgtttgggctgctatggaagaatgtcaagatttgggtttcaccaagtccattggtgtttctaacttctcctgcaaaaagctgcaagaattgatggctactgctaatattccaccagccgttaatcaagttgaaatgtctccagttttccagcagaagaagttgagagaatattgcaaagctaacaacatcctggtttccgctgtttctgttttgggttctaatggtacagcttggggttcaaatcaagttatgggttctgaagtcttgaagcaaattgctactgatagaggtaagtccgttgctcaaatttctatgagatgggtttatgaacaaggtgcctctttggttgttaagtcctttaatgaagtcaggatgcgtgagaacttgaacatttttaactggcagctgacaaaagaggacttggaaaagatttccgaaattccacaatgcagaatcttgaccggtgactttttggtttctgctaatggtccattcaagtccttacaagaattgtgggatgatcaggtctaa

SEQ ID NO: 112 - protein, 711 aa, Papaver somniferum
MESNSMKLSIVDLMSAILNGKLDQADSILIENREILMILTTAIAVFIGCGFLYIWRRSFRKSSKIVEVPKTFRKSSKIVEVPKTGFTKEPEPEIDDGKKKVTIFFGTQTGTAEGFAKALSEEAKARYDKAVFKVVDLDDYAADDDEFEEKLKKENLALFFLATYGDGEPTDNAARFYKWFTEVAKEKEPWLPNLNFGVFGLGNRQYEHFNKVAKVVDEIIVELGGKRLVPVGLGDDDQCIEDDFTAWRELVWPELDQLLLDENDSTSVSTPYAAAVAEYRVVFHDSADASLQDKNWSNANGYAVYDALHPCRANVAVRRELHTPASDRSCIHLEFDISGTGLTYETGDHVGVYSENCMETVEEAERLLGLSSDTVFSIHVDNEDGTPIAGSALPPPFPSPSTLRTALTKYADLLNFPKKAALHALAAHASDPKEAEQLRFLASPAGKDEYAQWVVASQRSLLEVMAEFPSAKPPLGVFFAAIAPRLQPRFYSISSSNRMAPSRIHVTCALVNERTPAGRIHKGVCSTWMKNSVPSEESRHCSWAPVFVRQSNFKLPADSTVPIIMIGPGTGLAPFRGFMQERLALKEAGVELGAAVLFFGCRNRSMDFIYEDELNNFVESGAISELVVAFSREGPTKEYVQHKMTEKASDIWNMISQGAYLYVCGDAKGMAKDVHRTLHTIVQEQGSLDSSKTEMLVKNLQMDGRYLRDVW

SEQ ID NO: 113 - DNA, 2136 bp, Papaver somniferum
  source 1..2136: mol_type = other DNA
atggaatccaactccatgaagttgtccatcgttgatttgatgtccgctatcttgaacggtaaattggatcaagccgattccatcttgatcgaaaacagagaaatcctgatgattttgaccaccgctattgctgtttttattggttgtggcttcctgtacatttggagaaggtctttcagaaagtcctccaagatagttgaagtcccaaagacctttaggaagtcctctaaaattgtcgaagttcctaagaccggtttcaccaaagaaccagaacctgaaattgatgacggtaagaagaaggtcactattttcttcggtactcaaactggtactgctgaaggttttgctaaagctttgtctgaagaggctaaagccagatatgataaggctgttttcaaggttgttgacttggatgattatgctgccgatgatgatgaattcgaagagaagttgaagaaagagaacttggccttgtttttcttggctacttatggtgatggtgaacctactgataatgctgctagattttacaagtggttcaccgaagttgccaaagaaaaagaaccttggttgccaaatttgaactttggtgtttttggtttgggcaacagacaatacgaacactttaacaaggttgctaaggttgtcgacgaaatcatcgttgaattaggtggtaaaagattggttccagtaggtttgggtgatgatgatcaatgtatcgaagatgatttcaccgcttggagagaattggtttggccagaattagatcaactgttgttggacgaaaacgattccacttctgtttctactccatatgctgctgctgttgctgagtatagagttgtttttcatgattccgctgatgcctcattgcaagataagaattggtctaatgctaacggttacgctgtttacgatgctttacatccatgtagagctaacgttgctgttagaagagaattgcatactccagcttcagatagatcctgcattcatttggaattcgacatttctggtactggtttgacttacgaaactggtgatcatgttggtgtctactctgaaaactgtatggaaactgttgaagaagctgaacgtttgttgggtttgtcatctgataccgttttctccatccatgttgataacgaagatggtactccaattgctggttctgctttgccaccaccatttccatctccatctactttgagaactgctttgactaagtacgccgatttgttgaatttcccaaaaaaagctgcattgcatgctttggctgctcatgcttctgatccaaaagaagcagaacaattgagattcttggcttctccagctggtaaagatgaatatgctcaatgggttgttgcctctcaaagatccttgttggaagttatggctgaattcccatctgctaaaccaccattgggtgttttttttgctgctattgctccaagattgcagccaagattttactccatttccagctctaatagaatggccccatctagaattcatgttacctgtgctttggttaacgaaagaactccagcaggtagaattcacaaaggtgtttgttctacctggatgaagaattccgttccatctgaagaatctagacattgctcttgggctccagtttttgttagacaatctaactttaagttgccagccgattctaccgttccaattatcatgattggtccaggtacaggtttggctccttttagaggttttatgcaagaaaggttggctttgaaagaagctggcgtagaattgggtgctgcagttttgttttttggttgcagaaacagatccatggacttcatctatgaagatgagttgaacaacttcgttgaatccggtgctatttccgaattggttgttgcattttctagagaaggtcccacaaaagaatacgtccaacataagatgactgaaaaggcctctgatatctggaacatgatttctcaaggtgcctacttgtatgtttgcggtgatgctaaaggtatggctaaggatgttcatagaacattgcataccatcgtccaagaacaaggttcattggattcttctaagaccgaaatgttggtcaagaacttgcaaatggatggtagatacttgagagatgtctggtaa

SEQ ID NO: 114 - protein, 692 aa, Arabidopsis thaliana [sequence omitted]

SEQ ID NO: 115 - DNA, 2079 bp, Arabidopsis thaliana
  source 1..2079: mol_type = other DNA
atgacttctgcactttatgcctccgatcttttcaaacaattgaaaagtatcatgggaacggattctttgtccgatgatgttgtattagttattgctacaacttctctggcactggttgctggtttcgttgtcttattgtggaaaaagaccacggcagatcgttccggcgagctaaagccactaatgatccctaagtctctgatggcgaaagatgaggatgatgacttagatctaggttctggaaaaacgagagtctctatcttcttcggcacacaaaccggaacagccgaaggattcgctaaagcactttcagaagagatcaaagcaagatacgaaaaggcggctgtaaaagtaatcgatttggatgattacgctgccgatgatgaccaatatgaggaaaagttgaaaaaggaaacattggctttcttttgtgtagccacgtatggtgatggtgaaccaaccgataacgccgcaagattctacaagtggtttactgaagagaacgaaagagatatcaagttgcagcaacttgcttacggcgtttttgccttaggtaacagacaatacgagcactttaacaagataggtattgtcttagatgaagagttatgcaaaaagggtgcgaagagattgattgaagtcggtttaggagatgatgatcaatctatcgaggatgactttaatgcatggaaggaatctttgtggtctgaattagataagttacttaaggacgaagatgataaatccgttgccactccatacacagccgtcattccagaatatagagtagttactcatgatccaagattcacaacacagaaatcaatggaaagtaatgtggctaatggtaatactaccatcgatattcatcatccatgtagagtagacgttgcagttcaaaaggaattgcacactcatgaatcagacagatcttgcatacatcttgaatttgatatatcacgtactggtatcacttacgaaacaggtgatcacgtgggtgtctacgctgaaaaccatgttgaaattgtagaggaagctggaaagttgttgggccatagtttagatcttgttttctcaattcatgccgataaagaggatggctcaccactagaaagtgcagtgcctccaccatttccaggaccatgcaccctaggtaccggtttagctcgttacgcggatctgttaaatcctccacgtaaatcagctctagtggccttggctgcgtacgccacagaaccttctgaggcagaaaaactgaaacatctaacttcaccagatggtaaggatgaatactcacaatggatagtagctagtcaacgttctttactagaagttatggctgctttcccatccgctaaacctcctttgggtgttttcttcgccgcaatagcgcctagactgcaaccaagatactattcaatttcatcctcacctagactggcaccatcaagagttcatgtcacatccgctttagtgtacggtccaactcctactggtagaatccataagggcgtttgttcaacatggatgaaaaacgcggttccagcagagaagtctcacgaatgttctggtgctccaatctttatcagagcctccaacttcaaactgccttccaatccttctactcctattgtcatggtcggtcctggtacaggtcttgctccattcagaggtttcttacaagagagaatggccttaaaggaggatggtgaagagttgggatcttctttgttgtttttcggctgtagaaacagacaaatggatttcatctacgaagatgaactgaataactttgtagatcaaggagttatttcagagttgataatggctttttctagagaaggtgctcagaaggagtacgtccaacacaaaatgatggaaaaggccgcacaagtttgggacttaatcaaagaggaaggctatctatatgtctgtggtgatgcaaagggtatggcaagagatgttcacagaacacttcatactatagtccaggaacaggaaggcgttagttcttctgaagcggaagcaattgtgaaaaagttacaaacagagggaagatacttgagagatgtgtggtaa

SEQ ID NO: 116 - protein, 506 aa, Papaver bracteatum
MAPINIEENDFWMIACTVIIVFALVKFMFSFYQSANTTEWPEGPKTLPIIGNLHQLGGGVPLQVALANLSKVYGGAFTIWIGSWVPMIVISDIDNAREVLVNKSADYSARDVPDILKIITANGKNIADCDSGPFWHHLKKGLQSCINPSNVMSLSRLQEKDMQNLIKSMQERASQQNGILKPLDHAKEASIRLLSRVIFGQDFSNEDLVIGVKDALDEMVRISGLASLADAFKIAKYLPSQRKNIRDMYATRDRVYNLIQPHIVSNLPANSFLHFLTSQDYSDEIIYSMVLEIFGLGVDSTAATAVWALSFLVGKQEIQEKLYREINNLTGGQRPVKVADLKELPYLQAVMKETLRMKPIAPLAVPHVAVKDTTFKGRRIVKGTKVMVNLYAIHHDPNVFPAPYKFIPERFLKDVNSDGRFGDINTMESSLIPFGAGMRICGGVELAKQMVGFALASMVNEFKWDCVSEGKLPDLREAVSFILYMKNPLEAKITPRDARSYKTFGQ

SEQ ID NO: 117 - DNA, 1521 bp, Papaver bracteatum
  source 1..1521: mol_type = other DNA
atggccccaatcaacatcgaagaaaacgatttttggatgattgcctgcaccgttattatcgtttttgccttggttaagttcatgttcagcttctaccaatctgctaacactactgaatggccagaaggtccaaaaaccttgccaattattggtaacttgcaccaattaggtggtggtgttccattgcaagttgctttggctaatttgtctaaagtttacggtggtgctttcaccatttggattggttcttgggttccaatgatcgttatctccgatattgataacgccagagaagttttggttaacaagtctgctgattactccgctagagatgttccagatattttgaagattattaccgccaacggtaagaacattgctgattgtgattctggtccattctggcatcatttgaagaagggtttacaatcctgcatcaacccatctaacgttatgtctttgtccaggttgcaagaaaaggacatgcagaacttgattaagtccatgcaagaaagggcttctcaacaaaatggtatcttgaagccattggatcatgctaaagaagcctctattaggttgttgtccagagttattttcggtcaggatttctccaacgaagatttggttattggtgttaaggatgccttggacgaaatggttagaatttctggtttggcttctttggctgatgctttcaaaattgctaagtacttgccaagccagagaaagaacattagagatatgtacgctaccagagacagagtctacaatttgattcaaccacacatcgtgtctaacttgccagctaattcattcttgcatttcttgacctctcaagactactccgacgaaattatctactccatggttttggaaatcttcggtttgggtgttgattctactgctgctacagctgtttgggctttgtcttttttggttggtaagcaagagatccaagagaagttgtacagagagattaacaacttgactggtggtcaaagaccagttaaggttgctgatttgaaagagttgccatacttgcaagccgttatgaaagaaaccttgagaatgaagccaattgctccattggctgttccacatgttgcagttaaggataccacttttaagggtagaagaatcgtcaagggtactaaggttatggttaacttgtacgccattcatcacgatccaaatgtttttccagctccatacaagttcatcccagaaagatttttgaaggacgttaactccgatggtagattcggtgatattaacaccatggaatcctcattgattccatttggtgctggtatgagaatttgcggtggtgttgaattggctaaacaaatggttggtttcgctttggcctctatggttaatgaattcaagtgggattgtgtctctgagggtaaattgccagatttgagagaagctgtctctttcatcttgtacatgaagaatccattggaggctaagattactccaagagatgctagatcttacaagacctttggtcagtaa

SEQ ID NO: 118 - protein, 503 aa, Papaver bracteatum
MAPINIEENDFWMIACTVIIVFALMKFMVSFYQSANTTEWPEGPKTLPIIGNLHQLGGGVPLQVALANLAKVYGGAFTIWIGSWVPMIVISDIDNAREVLVNKSADYSARDVPDILKIITANGKNIADCDSGPFWHHLKKGLQSCINPSNVMSLSRLQEKDMQNLIKSMQERASQQNGILKPLDHAKEASIRLLSRVIFGQDFSNEDLVIGVKDALDEMVRISGLASLADAFKIAKYLPSQKKNIRDMYATRDRVYNLIQPHIVSNLPANSFLHFLTSQDYSDEIIYSMVLEIFGLGVDSTAATAVWALSFLVGEQEIQEKLYREINNLTGGQRPVKVVDLKELPYLQAVMKETLRMKPIAPLAVPHVAAKDTTFKGRRIVKGTKVMVNLYAIHHDPNVFPAPYKFMPERFLKGVNSDGRYGDINTMESSLIPFGAGMRICGGVELAKQMVGFALASMVNEFKWDCVSEGNLPDLSEAISFILYMKNPLEAKVTPRTKPFDSR

SEQ ID NO: 119 - DNA, 1512 bp, Papaver bracteatum
  source 1..1512: mol_type = other DNA
atggccccaatcaacatcgaagaaaatgatttctggatgattgcctgcaccgttattatcgtttttgccttgatgaagttcatggtttccttctaccaatctgctaacactactgaatggccagaaggtccaaaaaccttgccaattattggtaacttgcatcaattgggtggtggtgttccattgcaagttgctttagctaatttggctaaagtttacggtggtgctttcaccatttggattggttcttgggttccaatgatcgttatctccgatattgataacgccagagaagttttggttaacaagtctgctgattactccgctagagatgttccagatattttgaagattattaccgccaacggtaagaacattgctgattgtgattctggtccattctggcatcatttgaagaagggtttacaatcctgcatcaacccatctaacgttatgtctttgtccagattgcaagaaaaggacatgcaaaacttgattaagtccatgcaagaaagagcctctcaacaaaacggtatcttgaaaccattggatcatgctaaagaagcctccatcagattattgtccagagttattttcggtcaagacttctccaacgaagatttggttattggtgttaaggatgccttggacgaaatggttagaatttctggtttggcttctttggctgatgctttcaaaattgctaagtacttgccatcccaaaaaaagaacatcagagatatgtacgccaccagagatagagtttacaacttgattcaaccacacatcgtcagtaatttgccagccaattcattcttgcatttcttgacctctcaagactactctgacgaaatcatctactccatggttttggaaattttcggtttgggtgttgattctactgctgctacagctgtttgggctttgtcttttttggttggtgaacaagaaatccaagaaaagttgtacagagaaatcaacaacttgaccggtggtcaaagaccagttaaggttgttgacttgaaagaattgccatacttgcaagccgttatgaaagaaaccttgagaatgaagccaattgctccattggctgttccacatgttgctgctaaagataccacttttaagggtagaagaatcgtcaagggtactaaggttatggttaacttgtacgccattcatcacgatccaaatgtttttccagctccatacaagttcatgcctgaaagatttttgaagggtgttaactccgatggtagatacggtgatattaacaccatggaatcctcattgattccatttggtgctggtatgagaatttgcggtggtgttgaattggcaaaacaaatggttggttttgctttggcctctatggtcaatgaatttaagtgggattgtgtctccgaaggtaacttaccagatttgtctgaagctatctccttcatcttgtacatgaagaatccattggaagctaaggttaccccaagaactaagccattcgattctagatga

SEQ ID NO: 120 - protein, 311 aa, Papaver bracteatum
MPETCPNTVTKMRCAVVTGGNKGIGFEICKQLSSSGIMVVLTCRDVTRGLEAVEKLKNSNHENVVFHQLDVTDPITTMSSLADFIKARFGKLDILVNNAGVAGFSVDADRFKAMISDIGEDSEEVVKIYEKPEAQELMSETYELAEECLKINYYGVKSVTEVLLPLLQLSDSPRIVNVSSSTGSLKYVSNETALEILGDGDALTEERIDMVVNMLLKDFKENLIETNGWPSFGAAYTTSKACLNAYTRVLAKKIPKFQVNCVCPGLVKTEMNYGIGNYTADEGAKHVVRIALFPDDGPSGFFYDCSELSAF

SEQ ID NO: 121 - DNA, 936 bp, Papaver bracteatum
  source 1..936: mol_type = other DNA
atgccagagacttgtccaaacactgtaacaaagatgcgttgtgctgtagttacgggtggtaataaaggtataggtttcgagatctgcaagcagctatcaagctctggcattatggtcgtcctaacttgccgcgacgttacgagaggcttagaagcggttgagaaacttaagaactcaaaccacgagaatgtagtgtttcatcagctggatgttactgacccgataacgacgatgagtagcttagctgatttcattaaggcaaggttcggcaagctggacatattggtaaacaacgcgggcgttgctggattctccgtagacgccgatagattcaaggctatgatcagtgacataggtgaagattcagaagaggttgtgaagatttatgaaaagccagaagcacaggagttgatgtcagagacctacgagcttgctgaggaatgtctgaagatcaattattatggtgtgaagagcgttacggaagtcttgttgccgctacttcaattgtcggattccccgcgcatcgttaacgtctcgagctctactgggagcctaaagtatgtatccaatgaaacggcattagagatattgggtgacggagatgctttgacggaagaaaggatcgacatggttgttaatatgcttttaaaagactttaaagagaatttgatagagacaaacggatggccctcttttggtgcggcttataccacgagtaaggcgtgcctgaatgcctacacccgcgttttagccaagaaaataccaaagttccaggtgaactgtgtgtgcccggggctagtaaagactgagatgaactatggaatcggtaattacaccgccgatgaaggagcgaagcatgtggtccgtattgctctctttcctgatgacggcccgtctggcttcttttacgactgctccgagttatccgcgttttag

SEQ ID NO: 122 - protein, 311 aa, Papaver bracteatum; identical to SEQ ID NO: 120

SEQ ID NO: 123 - protein, 474 aa, Papaver somniferum
MATMYSAAVEVISKETIKPTTPTPSQLKNFNLSLLDQCFPLYYYVPIILFYPATAANSTGSSNHHDDLDLLKSSLSKTLVHFYPMAGRMIDNILVDCHDQGINFYKVKIRGKMCEFMSQPDVPLSQLLPSEVVSASVPKEALVIVQVNMFDCGGTAICSSVSHKIADAATMSTFIRSWASTTKTSRSGGSTAAVTDQKLIPSFDSASLFPPSERLTSPSGMSEIPFSSTPEDTEDDKTVSKRFVFDFAKITSVREKLQVLMHDNYKSRRQTRVEVVTSLIWKSVMKSTPAGFLPVVHHAVNLRKKMDPPLQDVSFGNLSVTVSAFLPATTTTTTNAVNKTINSTSSESQVVLHELHDFIAQMRSEIDKVKGDKGSLEKVIQNFASGHDASIKKINDVEVINFWISSWCRMGLYEIDFGWGKPIWVTVDPNIKPNKNCFFMNDTKCGEGIEVWASFLEDDMAKFELHLSEILELI

SEQ ID NO: 124 - DNA, 1425 bp, Papaver somniferum
  source 1..1425: mol_type = other DNA
atggccactatgtactcagcagccgtggaagttatatcgaaggagacaatcaaacccacaacccccactccaagccagctgaagaacttcaacttaagtcttttagatcagtgctttcccttgtactactatgttcccataattttgttctatccggcaaccgctgcgaactccactggctcgagtaatcaccatgacgaccttgatttgctgaaaagctctttgtctaaaacattagtccatttctacccaatggctggaagaatgatagataatatcctagtagactgccacgaccagggaataaacttttataaggtaaagattcgaggcaagatgtgcgaatttatgtcccagccagacgtgccgctctcccagttacttccgtcagaggtggtatccgcttccgtaccaaaggaagcattggtcattgtccaagttaatatgttcgattgcggcggaaccgctatttgctcgtccgtatcgcacaagattgccgacgctgcgactatgagcacgttcattaggagctgggccagtacaactaaaacttcacgcagtggtggctcaacggcagctgtaacggatcaaaagctaatcccatcatttgattccgcctctttgttcccaccttccgagagattgacttcaccctcaggtatgagcgagatcccattttcctctactccggaagatactgaggatgacaaaactgttagtaagcgttttgtctttgactttgcgaagattacatccgtacgagagaaattacaggttttgatgcatgataactataaatccaggcgccagaccagagttgaggtagtgacatcgttgatttggaaatctgtaatgaagtctactcctgccggcttcctaccagtagttcaccatgcagttaatttacgtaagaaaatggacccaccactacaggatgtgtcttttggtaatttgtcggtcactgtatctgccttcctgccagctaccactaccaccaccactaacgctgtaaacaagacaataaacagcacgtctagcgaatcacaggtggttttacacgaactgcatgacttcatcgcgcagatgagatctgagatagacaaagttaagggagacaaaggtagccttgagaaggtcatccaaaacttcgcaagtggtcacgacgccagtataaagaaaattaacgacgtcgaggtaataaatttctggatctcttcctggtgtaggatggggttatacgagatcgatttcggatggggtaagcctatctgggttacagtagatcctaacattaaacctaacaagaactgcttctttatgaacgatacgaagtgtggcgagggtatagaggtgtgggcgtcattcttagaggatgatatggccaagttcgaattacacttgtctgagatacttgagttaatatag

SEQ ID NO: 125 - protein, 474 aa, Papaver somniferum; identical to SEQ ID NO: 123

SEQ ID NO: 126 - protein, 180 aa, Papaver somniferum
MDSINSSIYFCAYFRELIIKLLMAPLGVSGLVGKLSTELEVDCDAEKYYNMYKHGEDVKKAVPHLCVDVKIISGDPTSSGCIKEWNVNIDGKTIRSVEETTHDDETKTLRHRVFEGDVMKDFKKFDTIMVVNPKPDGNGCVVTRSIEYEKTNENSPTPFDYLQFGHQAIEDMNKYLRDSE

SEQ ID NO: 127 - protein, 480 aa, Papaver somniferum
METALAPROLEUGLYVALSERGLYLEUVALGLYLYSLEUSERTHRGLULEUGLUVALASPCYSASPALAGLULYSTYRTYRASNMETTYRLYSHISGLYGLUASPVALLYSLYSALAVALPROHISLEUCYSVALASPVALLYSILEILESERGLYASPPROTHRSERSERGLYCYSILELYSGLUTRPASNVALASNILEASPGLYLYSTHRILEARGSERVALGLUGLUTHRTHRHISASPASPGLUTHRLYSTHRLEUARGHISARGVALPHEGLUGLYASPVALMETLYSASPPHELYSLYSPHEASPTHRILEMETVALVALASNPROLYSPROASPGLYASNGLYCYSVALVALTHRARGSERILEGLUTYRGLULYSTHRASNGLUASNSERPROTHRPROPHEASPTYRLEUGLNPHEGLYHISGLNALAILEGLUASPMETASNLYSTYRLEUARGASPSERGLUSERASN

SEQ ID NO: 128 - protein, 180 aa, Papaver somniferum
MDSINSSIYFCAYFRELIIKLLMAPLGVSGLVGKLSTELEVDCDAEKYYNMYKHGEDVQKAVPHLCVDVKVISGDPTRSGCIKEWNVNIDGKTIRSVEETTHNDETKTLRHRVFEGDMMKDFKKFDTIMVVNPKPDGNGCVVTRSIEYEKTNENSPTPFDYLQFGHQAIEDMNKYLRDSE

SEQ ID NO: 129 - protein, 180 aa, Papaver somniferum
MDSINSSIYFCAYFRELIIKLLMAPPGVSGLVGKLSTELEVNCDAEKYYNMYKHGEDVQKAVPHLCVDVKVISGDPTRSGCIKEWNVNIDGKTIRSVEETTHNDETKTLRHRVFEGDMMKDFKKFDTIMVVNPKPDGNGCVVTRSIEYEKTNENSPTPFDYLQFGHQAIEDMNKYLRDSE

SEQ ID NO: 130 - DNA, 543 bp, Papaver somniferum
  source 1..543: mol_type = other DNA
atggactccatcaactcctctatctacttctgtgcttacttcagggaactgatcatcaagttgttgatggctccaccaggtgtttctggtttggttggtaaattgtctaccgaattggaagttaactgtgacgctgaaaagtactacaacatgtacaaacacggtgaagatgttcaaaaggctgttccacatttgtgcgttgatgttaaggttatttctggtgatccaactagatccggttgtatcaaagaatggaacgttaacattgacggtaagaccatcagatctgttgaagaaactactcacaacgacgaaactaagaccttgagacatagagttttcgaaggtgatatgatgaaggacttcaaaaagttcgataccatcatggttgttaacccaaagccagatggtaatggttgtgttgttaccagatccatcgaatacgaaaagaccaacgaaaattctccaactccattcgactacttgcaatttggtcatcaagccatcgaagatatgaacaaatacttgagggactccgagtaa

SEQ ID NO: 131 - protein, 160 aa, Papaver somniferum
MAPLGVSGLVGKLSTELEVDCDAEKYYNMYKHGEDVKKAVPHLCVDVKIISGDPTSSGCIKEWNVNIDGKTIRSVEETTHDDETKTLRHRVFEGDVMKDFKKFDTIMVVNPKPDGNGCVVTRSIEYEKTNENSPTPFDYLQFGHQAIEDMNKYLRDSESN

SEQ ID NO: 132 - DNA, 483 bp, Papaver somniferum
  source 1..483: mol_type = other DNA
atggctccattgggtgtttctggtttggttggtaaattgtctaccgaattggaagttgattgtgacgctgaaaagtactacaacatgtacaaacatggtgaggatgttaagaaggctgttccacatttgtgtgttgatgtcaagattatctctggtgatccaacttcttctggctgtatcaaagaatggaacgttaacattgatggcaagaccatcagatctgttgaagaaactactcacgatgacgaaactaagaccttgagacatagagttttcgaaggtgatgttatgaaggacttcaaaaagttcgataccatcatggttgttaacccaaagccagatggtaatggttgtgttgttaccagatccatcgaatacgaaaagaccaacgaaaattctccaactccattcgactacttgcaatttggtcatcaagccatcgaagatatgaacaaatacttgagggactccgagtctaactaa

SEQ ID NO: 133 - protein, 160 aa, Papaver somniferum; identical to SEQ ID NO: 131

SEQ ID NO: 134 - protein, 161 aa, Artificial
MAHHHSISGLVGKLVTELEVNCDADKYYKIYKHAEDVQKAIPHLCIDVKVISGDPTSSGCIKEWNVNIDGKTIRSVEETTHNDDTRTLRHRVFEGDVMKDFKKFDTIMVVNPKPDGNGCVVTRSIEYEKTNENSPTPFDYLQFGHQAIEDMNKYLRDSESN

SEQ ID NO: 135 - DNA, 486 bp, Artificial
  source 1..486: mol_type = other DNA
atggcccatcatcattccatctctggtttggttggtaaattggttaccgaattggaagttaactgtgatgccgataagtactacaagatctacaaacatgccgaagatgtccaaaaggctattccacatttgtgcatcgatgttaaggttatctctggtgatccaacttcttctggttgtatcaaagaatggaacgtcaacattgatggtaagaccatcagatctgttgaagaaactactcacaacgatgataccagaaccttgagacatagagttttcgaaggtgatgttatgaaggacttcaaaaagttcgataccatcatggttgttaacccaaagccagatggtaatggttgtgttgttaccagatccatcgaatacgaaaagaccaacgaaaattctccaactccattcgactacttgcaatttggtcatcaagccatcgaagatatgaacaaatacttgagggactccgagtctaactga

SEQ ID NO: 136 - protein, 159 aa, Artificial
MAHHHSISGLVGKLVTELEVNCDADKYYTIYKHAEDVQKAIPHLCIDVKVINGDPTSSGCIKEWNVNIDGKTIRSVEETTHNDDTRTLRHRVFEGDVMKDFKKFDTIMVVNPKPDGNGCVVTRSIEYEKTNENSPTPFDYLQFGHQAIEDMNKYLCDSE

SEQ ID NO: 137 - DNA, 480 bp, Artificial
  source 1..480: mol_type = other DNA
atggcccatcatcattccatctctggtttggttggtaaattggttaccgaattggaagttaactgtgatgccgataagtactacactatctacaaacatgccgaagatgtccaaaaggctattccacatttgtgcatcgatgttaaggttatcaatggtgatccaacctcttctggttgtatcaaagaatggaacgttaacattgacggtaagaccatcagatctgttgaagaaactactcacaacgatgataccagaaccttgagacatagagttttcgaaggtgatgttatgaaggacttcaaaaagttcgataccatcatggttgttaacccaaagccagatggtaatggttgtgttgttaccagatccatcgaatacgaaaagaccaacgaaaattctccaactccattcgactacttgcaatttggtcatcaagccatcgaagatatgaacaaatacttgtgcgactccgagtga

SEQ ID NO: 138 - protein, 159 aa, Artificial
MAHHHSISGLVGKLVTELEVNCDADKYYKIYKHAEDVQKAIPHLCIDVKVINGDPTSSGCIKEWNVNIDGKTIRSVEETTHNDDTRTLRHRVFEGDVMKDFKKFDTIMVVNPKPDGNGCVVTRSIEYEKTNENSPTPFDYLQFGHQAIEDMNKYLCDSE

SEQ ID NO: 139 - DNA, 480 bp, Artificial
  source 1..480: mol_type = other DNA
atggcccatcatcattccatctctggtttggttggtaaattggttaccgaattggaagttaactgtgatgccgataagtactacaagatctacaaacatgccgaagatgtccaaaaggctattccacatttgtgcatcgatgttaaggttatcaatggtgatccaacctcttctggttgtatcaaagaatggaacgttaacattgacggtaagaccatcagatctgttgaagaaactactcacaacgatgataccagaaccttgagacatagagttttcgaaggtgatgttatgaaggacttcaaaaagttcgataccatcatggttgttaacccaaagccagatggtaatggttgtgttgttaccagatccatcgaatacgaaaagaccaacgaaaattctccaactccattcgactacttgcaatttggtcatcaagccatcgaagatatgaacaaatacttgtgcgactccgagtga

SEQ ID NO: 140 - protein, 522 aa, Helicoverpa armigera
MIVLLSIVLPLIFCAFYLLATRKFQYWEKKKVPYIKPVPIFGNFSEYILQQKFIGEVVKEICQKFPNEPLIGAYYGTEPTLIVQDPELIKLVMTKDFYYFNGREVSDYSHRELFSRNLFATHGDQWKVLRQNLTPLFSSAKMKNMFHLIGKCSLVFEKVLDKETQKGDEIEVRALLAAYTMDCIGSCVFGVDTNVMEKKENNPFKNVGDVIFQSNKLRALKLVVRSIWPAIFFGLGFNTQPAEVKNFFTNLMTGIFSARQYTPTNRNDFVDLVLKLKNNKTMVGDSFNHMKGESAAKVTLDVDDELLIAQCFLFFAAGYETSATTLNYTLYELAKNPEAQEKALAEVDDYLRRNDNTLKYECVAETPYLEACTNEALRLYPVLAIPTREVMDDYTFPSGLKVEKGLRIHLPAYHLQRSPEYFPDPEKFQPERFLPENKQNIRQYTYFPFGDGPRVCIGIRFARMQMAAGLITLLKKYRVELAPGMKREVVFQPTSVVTQPIGGIRLKFVERENWEQRLLKSS

SEQ ID NO: 141 - DNA, 1569 bp, Helicoverpa armigera
  source 1..1569: mol_type = other DNA
atgatcgtcctgttgtccatcgttttgccattgattttttgcgccttttacttgttggctaccagaaagtttcaatactgggaaaagaagaaggtcccttacattaagccagttccaattttcggtaacttctccgagtatatcttgcagcaaaagttcattggtgaagtcgtcaaagaaatctgccaaaagtttccaaacgaaccattgattggtgcttattacggtactgaacctaccttgatagttcaagatccagagttgatcaagctggttatgactaaggatttctactacttcaacggtagagaagtctccgattattctcatagagagttgttctccagaaacttgtttgctactcatggtgatcaatggaaggtcttgagacaaaatttgacccctttgttctcctcagctaagatgaagaatatgttccacttgatcggtaagtgctccttggtttttgaaaaggtgttggacaaagaaacccaaaagggtgacgaaattgaagttagagctttgttggctgcttacaccatggattgcattggttcttgtgtttttggtgttgataccaacgtcatggaaaagaaagaaaacaacccattcaagaacgttggtgacgttatcttccaatccaacaaattgagagccttgaagttggttgttagatctatttggccagccatttttttcggtttgggttttaatactcaaccagccgaagttaagaacttcttcactaatttgatgaccggtatcttctctgctagacagtatactccaactaacagaaacgatttcgttgacctggttctgaagttgaagaacaacaaaactatggtcggtgactccttcaatcatatgaagggtgaatctgctgctaaggttactttggatgttgatgatgagttgttgattgcccaatgctttttgttttttgctgctggttacgaaacttctgctactactttgaattacaccttgtacgagttggctaagaatccagaagctcaagaaaaagctttggccgaagttgatgattacttgagaagaaacgataacaccttgaagtacgaatgtgttgctgaaactccatacttggaagcttgtactaatgaagctttgaggttgtatccagttttggctattccaaccagagaagttatggatgattacacttttccatccggtttgaaggttgaaaagggtttgagaattcatttgccagcttaccacttgcaaagatccccagaatattttccagatccagaaaagttccagccagaaagatttttgccagaaaacaagcaaaacatcaggcagtacacttactttccatttggtgatggtccaagagtctgcattggtattagatttgctagaatgcaaatggctgccggtttgattactttgttgaagaagtacagagttgaattggctccaggtatgaagagagaagttgttttccaacctacttctgttgttacccaacctattggtggtatcagattgaagttcgtcgaaagagaaaattgggaacagaggttgttgaagtcctcttga

SEQ ID NO: 142 - protein, 528 aa, Helicoverpa armigera
MNALLVLAVLVTVIIYLLYVLTTRKFDYWKKRNVPYHKPWPLLGNYAKYILQLEYPGHTIQKLCHKFKDQPYFGTYYGTEPALVITSPDVLKQVLTKDFYYVNGRESSDYCGREVTTHNVFFNAGDKWKIVRQNLTPLFTSAKMRNMFHLIETRAHVFEDMIDYETGMSKTIEARRFSARFTMDCICSCAFGVEANTMAPIQGDDTNPFRFMGNQIFEISYARGFKIVFRAIWPSIFYGLGYQLFPPAVDQFFGKLLKGVLESRNYEPSSRNDFIDLILGFKKEDVITGDSITSMKTGESKKITMKVDDELLLSQCIMFFAAGYETSAGTTSYTLYELAKNPEAQKRAAAEVDAFLRRHNNKINYDIVHELPFLEACVYEVLRMYPVLGNLTREVMDNYVLPTGLQLDKGVRIHVPIYHIHHNPEYFPDPFSFQPERFLPENKDKIKPNTFYPFGAGPRLCLGLRFAKMQVIAGLVTVLKKYRMELSDTMPRNLIFDARTFLTQPKDQGIDLRFIEREGWESRKYVRA

SEQ ID NO: 143 - DNA, 1587 bp, Helicoverpa armigera
  source 1..1587: mol_type = other DNA
atgaacgccttgttggttttggctgttttggttaccgttatcatctacttgttgtacgttttgaccaccagaaagttcgactactggaaaaagagaaatgtcccatatcataagccatggcctttgttgggtaattacgctaagtatatcttgcagttggaatacccaggtcataccattcaaaagttgtgccataagttcaaggaccaaccatactttggtacttactatggtactgaaccagccttggttattacttctccagatgttttgaagcaggtcttgactaaggatttctactacgtcaatggtagggaatcttctgattactgtggtagagaagttactacccacaacgtttttttcaacgctggtgataagtggaagatcgtcagacaaaatttgactcctttgttcacctctgccaagatgagaaatatgttccatttgatcgaaactagggcccacgttttcgaagatatgattgattacgaaaccggcatgtccaagactattgaagctagaagattttccgctagattcaccatggattgcatttgttcttgtgcttttggtgttgaagctaacactatggctccaattcaaggtgatgatacaaacccattcaggtttatgggtaaccagattttcgaaatctcttacgctagaggtttcaagatcgttttcagagctatttggccatccattttttacggtttgggttaccaattattcccaccagctgttgatcaattcttcggtaagttgttgaagggtgtcttggaatctagaaactacgaaccatcttccagaaacgatttcatcgatttgatcctgggcttcaagaaagaagatgttattaccggcgattccatcacttctatgaaaactggtgagtccaaaaagatcaccatgaaggttgatgatgagctgttgttgtctcaatgcattatgttttttgctgctggctacgaaacttctgctggtactacttcttataccttgtacgaattggctaagaacccagaagctcaaaaaagagctgctgctgaagttgatgcttttttgcgtagacataacaacaagatcaactacgacatcgttcacgaattgccatttttggaagcttgcgtttacgaagtcttgagaatgtatccagttttgggtaacttgaccagagaagtcatggataattacgttttgccaactggtctgcaattggataagggtgttagaattcatgttcccatctaccatatccatcacaacccagaatatttcccagatccattttcattccagccagaaagatttttgccagagaacaaggataagatcaagcccaatactttttacccatttggtgctggtccaagattgtgtttgggtttgagatttgctaagatgcaagttattgccggtttggttactgtcttgaaaaagtacagaatggaactgtctgataccatgccaagaaacttgattttcgatgctagaactttcttgacccagcctaaagatcaaggtattgacttgagattcatcgagagagaaggttgggaatccagaaagtatgttagagcttga

SEQ ID NO: 144 - protein, 522 aa, Helicoverpa armigera
MITSLLLTAVFVIIFTIYLVSKKKFQYWEKRKVPHLPPVPLLGNFGKFILQRQFLGYTLQDICEKFPKAPYVGAYFGTEPALLIQDPELIKLVITKDFYFFSGREVSEYVDKERFTQNLFSTSGNKWKVLRQNLTPVFTSAKMKNMFHLIEKCSHVFEDFLDKEAKSDDVEMRTLIARYTMDCIGTCAFGVETKTMNETENNPFTAVGNSIFTLSWFQGFKFVLRGIYPALFYALGFRSLPPEVDAFFSNLMTGVFKGRNYTPTSRNDFVDFVIKFKQNKTMTGDSLTNMKSDSQKKVSLEVDDDLLVAQCFIFFAAGYETSATTLSFTLYELAKNPEAQKRAIAEVDDYLRRHNNELKYECLSEMPFIEACIDETLRIYPVLSMLTREVVEDYTFPTGLKVEKGLRIFLPLYHLHHNPEYFPDPEEYRPERFLAENKDNIKPYTYMPFGDGPRICIGMRFAKMQMAAGIITLLKKYRLELAPGMSPKIEFEPNSFVSQVVGGIKLKMIEREGWEGRLLKTL

SEQ ID NO: 145 - DNA, 1569 bp, Helicoverpa armigera
  source 1..1569: mol_type = other DNA
atgatcacctccttgttgttgaccgctgttttcgttattatcttcaccatctacctggtgtccaagaagaaatttcaatactgggaaaagagaaaggtcccacatttgccaccagttccattattgggtaatttcggtaagttcatcttgcagagacaattcttgggttacaccttgcaagatatctgtgaaaagtttccaaaggctccatatgttggtgcttactttggtactgaaccagccttgttgattcaagatccagaattgatcaagctggttatcaccaaggacttctactttttcagtggtagagaagtctctgagtacgttgacaaagaaagattcacccagaacttgttctctacctctggtaacaaatggaaggtcttgagacaaaacttgactccagttttcacttccgctaagatgaagaatatgttccacttgatcgaaaagtgctcccacgtttttgaagattttttggacaaagaagccaagtccgacgacgttgaaatgagaactttgattgctagatacaccatggattgcattggtacttgtgcttttggtgttgaaactaagactatgaacgaaaccgaaaacaacccattcactgctgttggtaactctattttcaccttgtcttggtttcagggtttcaagtttgttttgagaggtatctacccagctttgttttacgctttgggttttagatctttgccacctgaagttgatgctttcttctctaatttgatgaccggtgtctttaagggtagaaactatactccaacctccagaaacgatttcgttgatttcgtcattaagttcaagcagaacaagaccatgactggtgattctttgactaacatgaagtccgactctcagaagaaggtttctttggaagttgacgatgatttgttggttgctcaatgcttcatttttttcgctgctggttacgaaacttctgctactactttgtcttttaccttgtacgagttggctaagaatccagaagctcaaaaaagagctattgccgaagtcgatgattacttgagaaggcataacaacgaattgaagtacgaatgcttgtccgaaatgccattcattgaagcttgtattgacgaaaccttgagaatctaccctgtcttgtctatgttgaccagagaagttgttgaggattacacttttccaaccggtttgaaggttgaaaagggcttgagaattttcttgccattataccacttgcatcacaacccagaatatttcccagatcctgaagagtatagaccagaaagatttttggctgagaacaaggataacatcaagccatatacttacatgccatttggtgatggtccaagaatctgtattggtatgagatttgccaagatgcaaatggctgctggtattattactctgttgaagaagtacagattggaattggctccaggtatgtctccaaagattgaatttgaacccaactccttcgtttcccaagttgttggtggtattaagctgaagatgatcgaaagagaaggttgggaaggtagattgctgaaaactttgtga

SEQ ID NO: 146 - protein, 523 aa, Helicoverpa armigera
MITTILLFGLSLLITALYLVFKRKFQYWEKRKVPHLPPVPLLGNFSKYILQKEFLGHAAQEICAKFPSEPVVGAYYATEPALIIQDPEFIKLVITKDFYFFNGREISEFGHRERLAKNLFSNSGDRWKVLRQNLTPIFTSSKMKNMFHLIEKCSHEFEDLLDREAEKAKEVEMRSLISRFTMDCIGNCAFGVHTNTMEQVENNPFMIVGSSFFFQTWFRSFTLVLRTVYPSIFYALGYKFVPTEAEDFFTHMLTGIFKARDYKPTSRNDFVDLMLKLKANKTLVGDSLQNMRSDGGKKVELEVDDDLLIAQCGLFFTAGYETSATTLSFTLFELAKNPEAQKRAIAEVDDYLRRHNNELKYECLSEMPFVEACFDETLRLYPVIGLLTREVMEDYTFPSGLKVEKGLRIFLPLYHLHHNPEFFPDPEEYRPERFLPENKHNIRPYTYMPFGDGPRICIGLRFAKMQMTAGIITVLKKYRLELAPGMKTKVDFTPKSTITQAIGGIKLNMIEREGWEQRLLKNL

SEQ ID NO: 147 - DNA, 1572 bp, Helicoverpa armigera
  source 1..1572: mol_type = other DNA
atgatcaccaccatcttgttgttcggcttgtctttgttgattactgccttgtacttggtgttcaagagaaagtttcaatactgggaaaagagaaaggttccacatttgccaccagttccattattgggtaatttctccaagtacatcctgcagaaagaatttttgggtcatgctgctcaagaaatctgtgctaaatttccatctgaaccagttgttggtgcttactatgctactgaaccagccttgattattcaagacccagaattcatcaagctggttatcactaaggacttctactttttcaacggcagggaaatttctgaattcggtcatagagaaagactggccaagaatttgttttccaactctggtgatagatggaaggtcttgagacaaaacttgactccaattttcacctcctccaagatgaagaatatgttccacttgatcgaaaagtgctcccacgaatttgaagatttgttggatagagaagccgaaaaggccaaagaagttgaaatgagatctctgatctctaggttcaccatggattgcattggtaattgtgctttcggtgttcataccaacactatggaacaagttgaaaacaacccctttatgatcgtcggttcttctttcttttttcaaacctggttcaggtccttcaccttggttttgagaactgtttacccatccattttctacgctttgggttacaagtttgttccaactgaagctgaagatttcttcacccatatgttgaccggtattttcaaggctagagattacaagccaacctccagaaatgatttcgttgacttgatgttgaagttgaaggctaacaagactttggttggtgactcattgcaaaacatgagatctgatggtggtaagaaggttgaattggaagttgatgatgatttgttgatcgctcaatgcggtttgttttttactgctggttacgaaacttctgctaccactttgtctttcactttgttcgaattggctaagaacccagaagctcaaaaaagagctattgctgaagttgacgattacttgagaaggcacaacaacgaattgaagtacgaatgcttgtctgaaatgccattcgttgaagcttgtttcgacgaaaccttgagattatacccagttattggtttgttgaccagggaagttatggaagattacacttttccatccggtttgaaagtcgaaaagggtttgagaatctttttgcccttgtaccacttgcatcacaatccagaatttttcccagatccagaagagtacagaccagaaagattcttgccagaaaacaagcacaacattagaccatacacttacatgccatttggtgatggtccaagaatatgcattggtttgagattcgctaagatgcaaatgaccgctggtattattaccgtcttgaagaagtacagattggaattggctccaggtatgaagactaaggttgattttactccaaagtccactattacccaagctattggtggtatcaagctgaacatgattgaaagagaaggttgggaacaaaggctgttgaagaacttgtaa

SEQ ID NO: 148 - protein, 517 aa, Helicoverpa armigera
MFFYLLVTLIAVTYYIITRKYDYWQKKKVAHKKPTFVLGNYGDIILQKKNFGIVLQDLCNEFPEEKFIGAFQGTEPVLIPKDPEIIKLIVTKDFAYFSGRDLSEHNHKDPAALNLFATYGDKWKVLRQNLTPLFSSAKMKNMFQLIANCSHVFEKMLDRETKISQEQEVRMLTSKYTMECIGTCAFGVDTKTMTEDKSENPFIKIADFFNPPKSAVYLRHIRSMWPSIFYLFGGRLLKKQLEFFHNLITSVMASRDYKFTGRNDFVDLIMGWKQNHQITGDSISNIKSHEHKKVTLEVNDDLLVAQCFVFFAAGFETSSSTLSYTLYELAKNQDIQEKVLAEVDAYLVRRENKLKYDCITDLPYLDAVLDETLRYYPLLGMIPRELMEDYVMPNGVKLEKHLRVHLPVYYLHHNPEYFPEPHVFRPERFYGEEKKKVNQYAYLPFGEGPRTCIGNRFAKMQMIAGLITMLKKYRLELADNMPRTVTFKAQSFLTHPEGGIYVKFIEREGWEKRVFVE

SEQ ID NO: 149 - DNA, 1554 bp, Helicoverpa armigera
  source 1..1554: mol_type = other DNA
atgttcttctacctgctggttaccttgattgctgttacctactacattatcacccgtaagtatgactactggcaaaagaaaaaggttgcccataagaagccaactttcgttttgggtaattacggtgacatcatcttgcagaagaagaactttggtattgtcttgcaggatttgtgcaacgaatttcccgaagaaaagttcattggtgctttccaaggtactgaaccagttttgattccaaaggatccagagatcatcaagttgatcgttactaaggatttcgcctacttctctggtagagatttgtctgaacataaccacaaagatccagctgctttgaatttgtttgctacctatggtgataagtggaaggtcttgagacaaaacttgactcctttgttctcctcagctaagatgaagaatatgttccaattgatcgccaactgctcccacgtttttgaaaaaatgttggacagggaaacgaagatctctcaagaacaagaggttagaatgctgacttctaagtacaccatggaatgtattggtacttgtgcttttggtgttgataccaagactatgaccgaagataagtctgaaaaccccttcattaagatcgccgatttctttaatccaccaaagtctgctgtttacttgagacacattagaagtatgtggccctccattttttacttgttcggtggtagactgttgaagaagcaattggaattcttccacaacttgatcacctctgttatggcttctagagattacaagttcaccggtagaaacgatttcgttgatttgattatgggttggaagcaaaaccatcaaattaccggtgattccatctccaacatcaaatcccatgaacataagaaggtcaccttggaagttaacgatgatttgttggttgctcagtgctttgttttttttgctgctggttttgaaacctcctcctctactttgtcttataccttgtacgaattggccaagaaccaggatattcaagaaaaggttttggctgaagttgatgcctacttggttagaagagaaaacaagttgaagtacgattgcatcaccgatttgccatatttggatgctgttttggacgaaactttgaggtactatccactgttgggtatgattccaagagaactgatggaagattacgttatgccaaacggtgtcaaattggaaaagcacttgagagttcatttgcccgtttactacttgcatcataacccagaatatttcccagaaccacacgtttttagaccagaaagattttacggtgaggaaaaaaagaaggttaaccagtacgcttacttgccatttggtgaaggtccaagaacttgcattggtaatagattcgctaagatgcaaatgatcgctggtttgattaccatgctgaagaagtatagattggaattggctgacaacatgccaagaactgttacttttaaggcccaatctttcttgactcatcctgaaggtggtatctacgttaagttcatcgaaagagaaggttgggaaaagagagttttcgtcgaatag

SEQ ID NO: 150 - protein, 528 aa, Helicoverpa armigera
MNALLVVAALVSTIIYLLYVLTTRKFDYWKKKNVPHHKPWPLLGNYAKYILQLEYPGHTIQKLCHKFKDQPYFGSYYGTEPTLVVTSPEMIKHVLTKDFYYVNGRESSDYSGSEITTQNVFFNAGDRWKIVRQNLTPLFTSAKMRNMFHLIEKCTHVFEDMIDYETGISKTIEARRFSARFTMDFICSCAFGLEANTMAPIHGDDTNPFRFMGNQIFEISYARGFKIVFRAIWPSIFYRLGYQLFPPAVDQFFNKLLKGVLESRNYEPSSRNDFIDLILGFKKEEIITGDSISNMKTGESKKITMKVDEELLLAQCIVFFAAGYETSAGTMSYTLFELAKNPEAQKRAADEVDAFLRRHNNKINYDVVNEMPFLEACVYEVLRMYPVLGNLTREVMDTYVLPTGLQLDKGVRIHVPIYHIHHNPEYFPDPFSFQPERFLPENKDKIKPNTFFPFGAGPRLCLGLRFAKMQVLAGLVTILKKYRMELSDTMPRDLVFDARTFLTQPKDQGIDLRFIEREGWESRKYVRA

SEQ ID NO: 151 - DNA, 1587 bp, Helicoverpa armigera
  source 1..1587: mol_type = other DNA
atgaacgccttgttggttgttgctgctttggtttctactatcatctacttgttgtacgtcttgaccaccagaaagtttgactactggaaaaagaagaacgttccacatcataagccatggccattattgggtaattacgctaagtacatcttgcagttggaatacccaggtcataccattcaaaagttgtgccataagttcaaggaccaaccatactttggttcttattacggtactgaacctaccttggttgttacttctccagaaatgattaagcacgttttgaccaaggatttctactacgtcaatggtagagaatcctctgattactccggttctgaaattactactcagaacgtttttttcaacgccggtgatagatggaagatcgttagacaaaatttgacccctttgttcacctctgctaagatgagaaatatgttccacttgatcgaaaagtgcacccacgttttcgaagatatgattgattacgaaaccggcatctccaagactattgaagctagaagattttccgctagattcaccatggatttcatttgttcttgtgcctttggtttggaagctaacactatggctccaattcatggtgatgatacaaacccattcaggtttatgggtaaccagattttcgaaatctcttacgctagaggtttcaagatcgttttcagagctatttggccatccatcttttacagattgggttaccaattattcccaccagctgttgatcaattcttcaacaagttattgaagggcgtcttggaatccagaaattacgaaccatcttccagaaacgatttcatcgatttgatcctgggcttcaagaaagaagaaattatcactggcgactccatctctaatatgaaaactggtgagtccaaaaagattaccatgaaggttgatgaagagttgttgttggctcaatgcatcgttttttttgctgctggttacgaaacttctgctggtactatgtcttacaccttgtttgaattggctaagaacccagaagctcaaaaaagagctgctgacgaagttgatgcttttttgcgtagacataacaacaagatcaactacgatgtcgtcaacgaaatgccattcttggaagcttgtgtttacgaagtcttgagaatgtatccagtcttgggtaacttgaccagagaagttatggatacttacgttttgccaactggtctgcaattggataagggtgttagaattcatgttcccatctaccatatccatcacaacccagaatatttcccagatccattttcattccagccagaaagatttttgccagagaacaaggataagatcaagcccaatacttttttcccatttggtgctggtccaagattgtgtttgggtttgagatttgccaagatgcaagttttggctggtttggttaccatcttgaaaaagtacaggatggaattgtctgacaccatgccaagagatttggtttttgatgctagaactttcttgacccagcctaaggatcaaggtattgatttgagattcatcgagagagaaggttgggaatctagaaagtatgttagagcctga

SEQ ID NO: 152 - protein, 518 aa, Heliothis virescens
MITTLLLFSLFVLITALYFVLKKKFQYWEKRNVPHVPPVPLLGNFAKYILQKEFIGHTAQEICSKFPNEPVVGAYYATEPALMVQDPELIKLVVTKDFYFFNGHEISEFAHRERLGKNLFASYGDKWKVLRQNLTPIFTSSKMKNMFHLIEKCSHDFEDLLDKEARKDKEVEMRSLIARFTMDGIGNCAFGIHTHTMEQSENNPFTTIGNAFFFHNWYRSFQLVLRTIYPSIFYGLGYKFIHTEAEDFFTNMLTEIFKARDYTPTNRNDFVDLMLKFKTKKTMVGDSLQNIKTDDRKKVELQVDDDLLIAQCVLFFTAGFETSATTLSFTLYELAKHPEAQKRAIAEVDDYLQRHNNELKYECLSEMPFIEACFDETLRMYPAAGLLLREVIQDYTFPSGLKVEKGLRVFVPLYHLHHNPAFFPDPEEYRPERFLPENKHNIRPYTYMPFGDGPRICIGMRFAKMQMTAGIITVLKKYRLELAPGMKTKVEFTPNSIITQVKGGIKLNMIEREGWEQR

SEQ ID NO: 153 - DNA, 1557 bp, Heliothis virescens
  source 1..1557: mol_type = other DNA
atgatcaccaccttgctgctgttttctttgttcgttttgattaccgccttgtacttcgtcttgaagaagaagtttcaatactgggagaagagaaacgttccacatgttccaccagttccattattgggtaatttcgctaagtacatcctgcagaaagaattcattggtcataccgctcaagaaatctgttctaagtttccaaacgaaccagttgttggtgcttattatgctactgaaccagctttgatggttcaagatccagaattgatcaagttggttgttaccaaggacttctactttttcaacggtcacgaaatttccgaattcgcccatagagaaagattgggtaagaatttgtttgcctcctatggtgataagtggaaggttttgagacaaaacttgaccccaattttcacctcctctaagatgaagaatatgttccacttgatcgagaagtgctcccatgattttgaagatttgttggacaaagaagcccgtaaggacaaagaggttgaaatgagatctttgattgccagattcaccatggatggtattggtaattgtgccttcggtattcatactcacactatggaacaatccgaaaacaacccattcactactattggtaacgctttcttcttccacaactggtacagatctttccaattggtcttgagaactatctacccctctattttctatggtttgggctacaagttcattcatactgaagctgaagatttcttcacgaacatgttgaccgaaattttcaaggctagagattacaccccaactaacagaaacgatttcgttgacctgatgttgaagttcaagactaagaaaactatggtcggtgactccttgcaaaacattaagactgatgataggaagaaggtcgaattgcaagttgatgatgatttgttgattgcccaatgcgttttgtttttcactgctggttttgaaacctctgctactactttgtctttcaccttgtacgaattggccaaacatccagaagctcaaaaaagagctattgccgaagttgacgattacttgcaaagacacaacaacgaattgaagtacgaatgcttgtctgagatgccattcattgaagcttgtttcgacgaaaccttgagaatgtatccagctgcaggtttgttgttgagagaagttattcaggattacactttcccatccggtttgaaagttgaaaagggtttgagagttttcgttcccttgtatcacttgcatcataatccagcatttttcccagatcctgaagagtatagaccagaaagatttctgccagaaaacaagcacaacattagaccatatacctacatgccatttggtgatggtccaagaatctgtattggtatgagattcgctaagatgcaaatgaccgctggtattattaccgtgttgaagaagtacagattggaattggctccaggtatgaaaactaaggttgaattcaccccaaactccattatcactcaagtaaaaggtggcatcaagctgaacatgattgaaagagaaggttgggaacagaggtga

SEQ ID NO: 154 - protein, 523 aa, Heliothis virescens
MITTLLLFSLSLLITALYLVLKKKFQYWEKRNVPHVPPVPLLGNFAKYILQKEFLGHSVQDICLTFPNEPVVGAYYATEPALIIQDPELIKLVVTKDFYFFNGREISKFNHRERLAKNLFSTYGDKWKVLRQNLTPIFTSSKMKNMFHLIEKCSHEFEDLLDKEAKKDKEVEMRSLIARYTMDCIGNCAFGVHTNTMEQSENNPFIIVGNSFFFHNWFRTFKLVLRTVYPSIFYGLGYKFVQTEAEDFFTNMLTGIFKARDYSPTNRNDFVDLMLKLKTKKTMVGDSLQNMKTDDAKKVELQVDDDLLIAQCGLFFTAGYETSATTLSFTLYELAKHPEAQKRAKAEVDDYLRRHNNELKYECLSEMPFVEACFDETLRLYPVLSVLTREVIEDYTFPSGLKVEKGLRIFLPLYHLHHNPEYFPNPEEYRPERFLPENKHNIRPYTYMPFGDGPRICIGMRFAKMQMTAGIITVLKKYRLELAPGMKTQVEFTTKSIVTQAMGGIKLNMIEREGWEQRVLKDL

SEQ ID NO: 155 - DNA, 1572 bp, Heliothis virescens
  source 1..1572: mol_type = other DNA
atgatcaccaccttgctgctgttctcattgtctttgttgattactgccttgtacctggtcttgaagaagaagtttcaatactgggagaagagaaacgttccacatgttccaccagttccattattgggtaatttcgctaagtacatcctgcagaaagaatttttgggtcactccgttcaagatatctgtttgacttttccaaacgaaccagttgttggtgcttattatgctactgaaccagccttgattatccaggatccagaattgattaagttggttgttaccaaggacttctacttcttcaacggtagagaaatctccaagttcaaccacagagaaagattggctaagaacttgttctctacctatggtgataagtggaaggtcttgagacaaaacttgactccaattttcacctcctccaagatgaagaatatgttccacttgatcgaaaagtgctcccacgaatttgaagatttgttggacaaagaagccaagaaggacaaagaggttgaaatgagatctttgattgccagatacaccatggattgcattggtaattgtgcttttggtgttcataccaacactatggaacagtctgaaaacaacccattcatcatcgtcggtaactcattctttttccataactggttcaggaccttcaagttggttttgagaactgtttacccctccattttttacggtttgggttacaagttcgttcaaactgaagctgaagatttcttcacgaacatgttgaccggtattttcaaggctagagattactctccaactaacagaaacgatttcgtcgacttgatgttgaagctaaagaccaaaaagaccatggttggtgactcattgcaaaacatgaaaaccgatgatgctaagaaggtcgaattgcaagttgatgatgatttgttgatcgctcaatgcggtttgttttttactgctggttacgaaacttctgctaccactttgtcttttaccttgtacgaattggccaaacatccagaagctcaaaaaagagctaaagccgaagttgacgattacttgagaaggcataacaacgaattgaagtacgaatgcttgtccgaaatgccattcgttgaagcttgttttgacgaaactttgaggttgtacccagtcttgtctgttttgaccagagaagttattgaggactacacttttccatccggtttgaaagttgaaaagggcttgagaatctttttgcccttgtatcacttgcatcacaacccagaatatttcccaaatccagaagagtacagaccagaaagattcttgccagaaaacaagcacaacattagaccatacacttacatgccatttggtgatggtccaagaatctgtattggtatgagattcgctaagatgcaaatgaccgctggtattattaccgtcttgaaaaagtacagattggaattggctccaggtatgaaaacccaagttgaattcactaccaagtccatcgttactcaagctatgggtggtattaagttgaacatgatcgaaagagaaggttgggaacaaagagttttgaaggacttgtag

SEQ ID NO: 156 - protein, 344 aa, Spodoptera exigua
TMDAIGNCAFGVETRTMVKTENNPFTKIGNVIFDTNWFRAFKLVARGIWPAIFYGLGYKSQPVDVDKFFTNLMTETFKGRDYKPTTRNDFVDLMLKLHNQKTVTGDSMSNMKGDAGKKLTLEIDDEFLISQCFLFFAAGFETSATTLSYTLFELAKNPAAQDLAFQDVENYLRRNNNVLKYECVTELPYVEACVNEALRLYPVLGVITREVIEDYTFPTGLKLEKGLRVHLPVYHMQHNPKYFPEPEQFRPERFLGDAKQEIRPYTYFPFGEGPRLCIGMRFAKMQITAGIITLLKKYRVELATGMSEKVQFEPRSVITAPIGGIRLKFIEREGWQQRVLKVAS

SEQ ID NO: 157 - DNA, 1575 bp, Spodoptera exigua
  source 1..1575: mol_type = other DNA
atgatcgccctgtatctgttgttggctattccattggcactgtactctatctacttcatctctaagagaaagtaccaatactgggagagaaagaaggtttctcatttgccaccaagaccaattttgggtaatttctctgagtacatcctgcagaagaagtactttggtagagtcgaacaagaattgtgccaaacttttccagaagaaccatacgttggtacttatttgggtactgaacctaccttgatagttcaagatccagaattgattaaggccgttatgaccaaggattactactacttttctggtagagaagcctccaactactccgaaaaagaattgatcactaggaacctgttcttctcctatggtgacaaatggaaggttcaaagacaaaacttgacccctttgttctcctcagctaagatgaagaatatgttccacttgattgaaaagtgcgccagagtctttgaaaacttgatagaccaagaggtccaaaagtccaacgatattgaagttagagctttgatcggtaagttcaccatggatgctattggtaattgtgctttcggtgttgaaactagaactatggttaagaccgaaaacaacccattcaccaagattggtaacgttatctttgataccaactggttcagagcctttaagttggttgctagaggtatttggccagctattttctatggtttgggttacaaatcccaaccagttgatgttgataagttcttcactaacttgatgaccgaaaccttcaagggtagagattataagccaaccactagaaacgatttcgtcgacttaatgctgaagttgcacaatcaaaagactgttaccggtgactctatgtctaatatgaagggtgatgctggtaagaagttgaccttggaaattgatgacgagttcttgatctctcagtgctttttgttttttgctgccggttttgaaacttctgctactacattgtcttacaccttgttcgaattggctaaaaatccagctgctcaagatttggcttttcaagatgtcgaaaactacttgaggcgtaacaacaacgttttgaagtacgaatgtgttaccgaattgccttacgttgaagcttgtgttaatgaagctttgaggttgtatccagttttgggtgttattaccagagaagttatcgaggattacacttttccaaccggtttgaagttggaaaaaggtttgagagttcacttgccagtttaccatatgcaacataacccaaagtatttcccagaaccagaacaattcagaccagaaagatttttgggtgatgccaagcaagaaattagaccctatacttactttccattcggtgaaggtccaagattgtgtattggtatgagattcgccaagatgcaaattaccgctggtattattaccctgctgaaaaagtacagagttgaattggcaactggtatgtccgaaaaggtacaatttgaacctagatccgttattaccgctccaattggtggtattagattgaagttcatcgaaagagaaggttggcaacaaagagttttgaaggttgcttcttaa

SEQ ID NO: 158 - protein, 523 aa, Heliothis virescens
MITTLLLFVLSLLITTLYLVFKKKFQYWEKRNVPHVPPVPLLGNFANYILQKEFLGHTTQEICSKFPNEPIVGAYYATEPALIIQDPEVIKHVVTKDYYFFSGREISDFTHRERLTVNLFATYGDRWKVLRQNLTPIFTSSKMKNMFHLIEKCSHEFEDLLDKEAKKDKEVEMRSLIGRYTMDCIANCAFGVHTHTMEQSENNPFMTVGNLFFYHNWYRSFQLNLRTIYPSIFYALGYKFVPTEAEDFFTNMLTGIFKARDYSPTNRNDFVDLMLKLKTNKTMVGDSLQNLKTDDRKKVELQVDDDLLIAQCGLFFTAGFETSATTLSFTLYELAKHPEAQKRAIAEVNDYLRRHNNELKYECLSEMPFVEACFDETLRLYPVLSMLTREVIEDYTFPSGLKVEKGLRIFLPLYHLHHNPAFFPDPEEYRPERFLPENKHNIIPYTYMPFGDGPRICIGMRFARMQMTAGIITVLKKYRLELAPGMKTQVEFTPNSIVTQVKGGINLNMIEREGWEQRVLKDL

SEQ ID NO: 159 - DNA, 1572 bp, Heliothis virescens
  source 1..1572: mol_type = other DNA
atgatcaccaccttgctgttgttcgtcttgtctttgttgattacgaccctgtacttggtgttcaagaagaagtttcaatactgggagaagagaaacgttccacatgttccaccagttccattattgggtaatttcgctaactacatcctgcagaaagaatttttgggtcacactacccaagaaatctgttctaagtttccaaacgaacctatcgttggtgcttattatgctactgaaccagccttgattatccaagatcctgaagttattaagcacgttgttaccaaggactactacttctttagcggtagagaaatctctgatttcacccacagagaaagattgaccgttaatttgtttgctacctacggtgatagatggaaggttttgagacaaaacttgaccccaattttcacctcctctaagatgaagaatatgttccacttgatcgagaagtgctcccatgaatttgaagatttgttggacaaagaagccaagaaggacaaagaggttgaaatgagatctttgatcggtagatacaccatggattgcattgctaattgtgctttcggtgttcatactcataccatggaacaatctgaaaacaacccattcatgaccgttggtaacttgttcttttaccacaactggtacaggtccttccaattgaatttgagaactatctacccctccattttctacgctttgggttataagtttgttccaactgaagccgaagatttcttcactaatatgttgaccggtatcttcaaggccagagattattctccaactaacagaaacgatttcgtcgacttgatgttgaagctaaagactaacaagaccatggttggtgactcattgcagaacttgaaaaccgatgatagaaagaaggtcgaattgcaagttgatgacgatttgttgatagctcaatgcggtttgtttttcactgctggttttgaaacatctgctaccactttgtctttcaccttgtacgaattggctaaacatccagaagctcaaaagagagctattgccgaagttaatgattacttgagaaggcacaacaacgagttgaagtacgaatgtttgtctgaaatgccattcgttgaagcttgtttcgacgaaaccttgagattatacccagtgttgtctatgttgactagggaagttattgaggactacacttttccatctggtttgaaggttgaaaagggcttgagaatcttcttgccattataccacttgcatcataacccagcatttttcccagatccagaagagtatagaccagaaagattcttgccagaaaacaagcacaacattatcccatacacttacatgccatttggtgatggtccaagaatctgtattggtatgagattcgctagaatgcaaatgaccgctggtattattaccgtcttgaagaagtacagattggaattggctccaggtatgaaaacccaagttgaattcactccaaactccatcgttactcaagtaaaaggtggtatcaacctgaacatgatcgaaagagaaggttgggaacaaagagttttgaaggacttgtag

SEQ ID NO: 160 - protein, 523 aa, Cnaphalocrocis medinalis
MLWIILFVFSAIFALIYYWSQRKYDYWKKQKVPYLKPTPILGNYGDFILQKRHMLYVMEDFCNRLPNEPYFGVFYGTGPALIVRDLELLKLITTKDFYYFNGREASEYVHKEEFTKNLFNNSGDYWRVMRQNLTPMFTSAKMKNMFPLITKCAYEFEKLLDSESKKDDIEAREQVGRFTMACVVSCAFGVDSATMEENTDENNPFVKVKDAFFSGSKWVSFKGTFKSVWPSIFYGLGLKSVPAGVNEIMKNFMLSVFEGRQYKSTTRNDFVDFILKFREKSEIVGDSITNLKTGENKKVHLEITDDLLTSQCILIFAAGFETSATTANYTLYELAKHPEIQKKVQEEIDGYLQKTGNQLNYDVVTELPYTYACIEETMRFYPVLPMLSREVIEDYTLPNGVFLEKGTRIHIPVRKIQRDPKNFPEPEVFRPERFLGEERQKIPPYSYLPFGEGPRICIGIRFAKMQMLAGLVTLLKKFNVELKDKSRTSVEYEPQSIIPTPRYPLKLKVTPRDGWETRTFVQT

SEQ ID NO: 161 - DNA, 1572 bp, Cnaphalocrocis medinalis
  source 1..1572: mol_type = other DNA
atgctgtggatcatcctgttcgttttctctgctattttcgccttgatctactattggtcccaaagaaagtacgactactggaagaaacaaaaggtcccatatttgaagccaactccaattttgggtaactacggtgatttcatcttgcaaaaaaggcacatgttgtacgtcatggaagatttctgtaacaggttgccaaatgaaccatacttcggtgttttttatggtactggtccagctttgatcgttagagacttggaattattgaagctgatcaccaccaaggacttctactactttaatggtagagaagcctctgagtacgttcacaaagaagaattcactaagaacctgttcaacaactccggtgattattggagagttatgagacaaaacttgaccccaatgttcacttctgctaagatgaagaatatgttccccttgattaccaagtgcgcttacgaatttgaaaagttgttggactccgaatccaagaaggatgatattgaagcaagagaacaagtcggtagattcactatggcttgtgttgtttcttgtgctttcggtgttgattctgctacaatggaagaaaacactgacgaaaacaacccattcgttaaggttaaggatgctttcttctctggctctaaatgggtttcttttaagggcacttttaagtccgtttggccatctattttctacggtttgggtttgaaatctgttccagctggtgttaacgaaatcatgaagaacttcatgctgtccgtttttgaaggtagacagtacaagtctactaccagaaacgatttcgttgacttcatcttgaagttcagggaaaagtctgaaatcgttggtgattccatcaccaacttgaaaactggtgaaaacaagaaggtgcatttggaaattaccgatgacttgttgacctctcaatgcattttgatttttgctgccggttttgaaacctctgctactactgctaattacaccttgtacgaattggccaaacatccagaaatccaaaagaaggtccaagaagaaattgacggctacttgcaaaagaccggtaatcaattgaactacgatgttgttaccgaactgccatatacctacgcttgtattgaagaaaccatgagattctacccagtcttgccaatgttgtccagagaagttattgaggattacactttgccaaacggcgtttttttggaaaagggtactagaattcacatccccgttagaaagattcagagagatccaaagaatttcccagaaccagaagttttcagaccagaaaggtttttgggtgaagaaagacaaaagatcccaccatattcttacttgccatttggtgaaggtcctagaatctgcattggtattagattcgctaagatgcaaatgttggctggtttggttaccctgttgaagaagtttaacgttgagttgaaggacaagtccagaacctctgttgaatatgaaccacaatccatcattcccactccaagatatccattgaagttgaaggttactccaagagatggttgggaaactagaactttcgttcaaacctga

SEQ ID NO: 162 - protein, 517 aa, Bombyx mandarina
MFLLINICVILFVIYYLLTKKYSYWRNRNVSHEKPVLLLGNYGDLILQKKNFGEMAQAICQKFPGEPVVGAFFGTEPVLIPQDPEVIKTILTKDFYYFNGREISEHVHKELLSYNLFATYGDEWKILRQNLTPIFSTAKLKSMFTLIEKCSKSFQNLLEDETKISKELEVRTLMQRFTIECIGSCIFGVDTDTLGNDKMNPFKTVGSQLSDFSRFVFVKGIVRAIWPTLFYALGFKTLTTELDIFKKLVNAVFTQRKHKPTTRNDFIDIILTWKNNNAITGDSIGSFKNSDKTKFSIDVNDDLLLAQCLVFFAAGFETSAMTSSYTLHELAKNQRALKKACDEVDAYLLRHGNKINYDCVTELPYLEACIEETLRLYPVLGIITREVMEDYVLLDKIHLKKGDRIHVPVFHLHHNPEHFPNPEEYRPERFYGEEKRKVKPYTYLPFGEGPRICIGMRFAKMQSIAGLITILKKFRLELPEGAPTKIEFKPEAFVTTPKDLIKIKFLEREGWQQRVFV

SEQ ID NO: 163 - DNA, 1554 bp, Bombyx mandarina
  source 1..1554: mol_type = other DNA
atgttcctgctgatcaacatctgcgttatcttgttcgttatctactacctgttgaccaagaagtactcctattggagaaacagaaatgtctctcacgaaaagccagttttgttgttgggtaattacggtgacttgatcctgcagaaaaagaactttggtgaaatggctcaagctatctgtcaaaagtttccaggtgaaccagttgttggtgctttttttggtacagaaccagttttgattccacaagatccagaagttatcaagaccatcttgaccaaggatttctactacttcaacggtagggaaatctctgaacacgtccacaaagaactgttgtcttacaatttgttcgctacctatggtgacgaatggaagattttgagacaaaacttgaccccaattttctccactgctaagttgaagtctatgttcaccttgatcgaaaagtgctccaagtctttccaaaatttgttggaggacgagactaagatctccaaagaattggaagttagaaccttgatgcagaggttcaccattgaatgtattggttcttgcatcttcggtgttgatactgatactttgggtaacgataagatgaacccattcaagactgttggttcccaattgtctgatttctccagattcgttttcgttaagggtatcgttagagctatttggccaactttgttttacgctttgggtttcaagactttgaccaccgaattggacatcttcaagaaattggttaacgccgttttcacccaaagaaaacataagccaactaccagaaacgacttcatcgatattatcttgacctggaagaacaacaacgctattaccggtgattctatcggttcttttaagaactctgacaagaccaagttctccatcgatgttaacgatgatttgctgttggctcaatgcttggttttttttgctgctggttttgaaacctctgctatgacttcttcttacaccttgcatgaattggctaagaatcaaagggctttgaaaaaggcctgtgatgaagttgatgcttacttgttgagacacggtaacaagattaactacgattgcgttactgagttgccatacttggaagcttgtattgaagaaaccttgaggttgtatccagtcttgggtattattaccagagaagtcatggaagattacgtcttgttggataagatccacttgaagaaaggtgacagaatccatgttccagttttccacttgcatcataacccagaacatttcccaaatcctgaagagtatagaccagaaagattctacggtgaagaaaagagaaaggttaagccatacacttacttgccatttggtgaaggtccaagaatctgtattggtatgagattcgctaagatgcaatccattgctggtttgatcaccatcctgaaaaagttcagattggaattgccagaaggtgccccaacaaaaattgagtttaaaccagaagctttcgtcactaccccaaaggatttgattaagatcaagttcttggagagagaaggttggcaacaaagagttttcgtttaa

SEQ ID NO: 164 - protein, 517 aa, Bombyx mori
MFLLINICVILFVIYYLVTKKYSYWRNRNVSHEKPVLLLGNYGDLILQKKNFGEMARAICQKFPGEPVVGAFFGTEPVLIPQDPEVIKTILTKDFYYFNGREISEHVHKELLSYNLFATYRDEWKILRQNLTPIFSTAKLKSMFTLIEKCSKSFQNLLEDETKISKELEVRTLMQRFTIECIGSCIFGVDTDTLGNDKMNPFKAAGSQLSDFSRLVFVKGIVRAIWPTLFYALGFKTFTTELDIFKKLVNAVFAQRKHKPTTRNDFVDLILTWKNNNTITGDSIGSFKNSDKTKFSIDVNDDLLLAQCLVFFAAGFETSAMTSSYTLHELAKNQRALKKACDEVDAYLLRHGNKINYDCVTELPYLEACIEETLRLYPVLGIITREVMEDYVLLDKIHLKKGDRIHVPVFHLHHNPEHFPNPEEYRPERFYGEEKRKVKPYTYLPFGEGPRICIGMRFAKMQSIAGLITILKKFRLELPEGAPTKIEFKPEAFVTTPKDLIKIKFLEREGWQQRVFV

SEQ ID NO: 165 - DNA, 1554 bp, Bombyx mori
  source 1..1554: mol_type = other DNA
atgttcctgctgatcaacatctgcgttatcttgttcgttatctactacttggtcacgaagaagtactcctattggagaaacagaaatgtctctcacgaaaagccagttttgttgttgggtaattacggtgacttgatcctgcagaaaaagaactttggtgaaatggctagagctatctgtcaaaagtttccaggtgaaccagttgttggtgctttttttggtacagaaccagttttgattccacaagatccagaagttatcaagaccatcttgaccaaggacttttactacttcaacggtagggaaatctctgaacacgtccacaaagaactgttgtcttacaatttgttcgccacctatagagatgagtggaagattttgagacaaaacttgaccccaattttctccactgctaagttgaagtctatgttcaccttgatcgaaaagtgctccaagtctttccaaaatttgttggaggacgagactaagatctccaaagaattggaagttagaaccttgatgcagaggttcaccattgaatgtattggttcttgcatcttcggtgttgatactgatactttgggtaacgataagatgaacccattcaaagctgctggttctcaattgtctgatttctccagattggttttcgttaagggtatcgttagagctatttggccaactttgttttacgctttgggtttcaagactttcaccaccgaattggacatcttcaagaaattggttaacgctgttttcgcccaaagaaaacataagccaactaccagaaacgatttcgtcgatttgattttgacctggaagaacaacaacaccattaccggtgattctatcggttcttttaagaactctgacaagaccaagttctccatcgatgttaacgatgatttgctgttggctcaatgcttggttttttttgctgcaggttttgaaacttccgctatgacttcttcttacaccttgcatgaattggctaagaatcaaagggctttgaaaaaggcctgtgatgaagttgatgcttacttgttgagacacggtaacaagattaactacgattgcgttactgagttgccatacttggaagcttgtattgaagaaaccttgaggttgtatccagtcttgggtattattaccagagaagtcatggaagattacgtcttgttggataagatccacttgaagaaaggtgacagaatccatgttccagttttccacttgcatcataacccagaacatttcccaaatcctgaagagtatagaccagaaagattctacggtgaagaaaagagaaaggttaagccatacacttacttgccatttggtgaaggtccaagaatctgtattggtatgagattcgctaagatgcaatccattgctggtttgatcaccatcctgaaaaagttcagattggaattgccagaaggtgccccaacaaaaattgagtttaaaccagaagctttcgtcactaccccaaaggatttgattaagatcaagttcttggagagagaaggttggcaacaaagagttttcgtttaa

SEQ ID NO: 166 - protein, 526 aa, Spodoptera exigua
MITLYLLLAISLALYGVYLVSKRKFRYWEKKKVPHLPPKPIVGNFAEYILQQKYYGRVEQEICNKFPEEPYVGSYFGTEPALILQDPEYIKTVMTKDYYFFSGREVSSYSEKEVLTQNLFFSYGDRWKVLRQNLTPLFSSAKMKNMFHLIEKCARIFENMIDQEIQKNENIEVRALTGKFTMDAIGNCAFGVETWTMVKTDNNPFTKIGDVIFDTARLRALKFVARSIWPAIFYACGGKSLPVDVDRFFSNLMTGVFKGRDYKPTSRNDFVDLILKLYNNKTVTGDSLTNMKGESGKKVSLDVDEDFLISQCFLFFIAGYETSATTLSYTFYELAKNTRAQELAIQDVDNYLQRNDNVLKYECTTELPYIEACVDEALRLYPALGVLTREVIEDYTFPTGLKLEKGLRVHLPVYHMQHNPKYFPEPEQYRPERFLGEEKKNITPYTYFPFGEGPRLCIGMRFAKMQITAGIITILKKYRVELAPGMGEKVQFEPRSIVTAPIGGIRLKFIEREGWEQRVFKAPPEA

SEQ ID NO: 167 - DNA, 1581 bp, Spodoptera exigua
  source 1..1581: mol_type = other DNA
atgatcaccctgtacttgttgttggctatttctttggcattatacggcgtctacttggtgtctaagagaaagtttagatactgggagaagaagaaggttccacatttgccaccaaaacctatcgttggtaattttgctgagtacatcttgcagcaaaagtactacggtagagtcgaacaagaaatctgtaacaagtttccagaagaaccatacgtcggttcttactttggtactgaaccagctttgatattgcaagatccagagtacattaagaccgttatgaccaaggattactacttcttcagtggtagagaagtctccagctactctgaaaaagaagttttgacccagaacctgttcttctcatatggtgatagatggaaggtcttgagacaaaacttgactcctttgttctcctcagctaagatgaagaatatgttccacttgattgaaaagtgcgccaggatcttcgaaaacatgattgatcaagagatccaaaagaacgagaacatcgaagttagagctttgactggtaagttcaccatggatgctattggtaattgtgcctttggtgttgaaacttggactatggttaagaccgataacaacccattcaccaagattggtgatgttattttcgataccgctagattgagagccttgaagtttgttgctagatctatttggccagctattttctatgcttgtggtggtaaatctttgccagttgatgttgacagattcttctccaatttgatgaccggtgttttcaagggtagagattataagccaacctccagaaacgatttcgttgacttgattctgaagctgtacaacaacaaaactgttaccggtgattctctgactaacatgaagggtgaatctggtaagaaagtttccttggatgttgatgaggacttcttgatttctcagtgcttcttgtttttcattgccggttacgaaacttctgctactactttgtcttacaccttctacgaattggctaaaaacactagagcacaagaattggccattcaagatgtcgataactacttgcaaagaaacgacaacgtcttgaagtacgaatgtactaccgaattgccttacattgaagcttgtgttgatgaagctttgagattatatccagccttgggtgttttgaccagagaagttattgaagattacactttcccaaccggtttgaagttggaaaaaggtttgagagttcacttgccagtttaccatatgcaacataacccaaagtatttcccagaaccagaacagtatagaccagaaagatttttgggtgaagaaaagaagaacatcaccccatacacttactttccatttggtgaaggtccaagattgtgcattggtatgagatttgccaagatgcaaattaccgctggtattatcaccatcctgaaaaagtacagagttgaattggctccaggtatgggtgaaaaagttcaatttgaacccagatctatcgttaccgctccaattggtggtattagattgaagttcatcgaaagagaaggttgggaacagagagtttttaaagctccaccagaagcttga

SEQ ID NO: 168 - protein, 549 aa, Spodoptera frugiperda
MITLYLLLAIPLALYILYLISIRKYRYWEQKKVPHLPPKPFLGNFSEYILQKKQLGRLEQELCEMFPEEPYVGTYLGTEPTLIIQDPELIKAVMTKDYYYFSGREASNYWDKELVTRNLFFSYGDNWKVQRQNLTPLFSSAKMKNMFHLIEKCARDFENMLDQEAQTGKDIEVRALMGKFTMDAIGNCVFGIETRTMVKTENNPFTKIGNVIFDIDSFKAFKSVARSIWPAIFYGLGCRTQPVDIDNFFTNLMTETFKGRDYKPTTRHDFVDLMLKLYNQRTVTGDSISSMKGDEAKKVTLEIDAEFLISQCFLFFAAGFETSATTLAYTLFELAKNPEAQALAIQDVDSYMQRNGNVLKYECVTELPYVEACVNEALRLYPVLGVITREVVEDYTFSTGLKLEKGLRIHLPVFHMQHNPKYFPDPEQFSPERFLGDCKQNITPYTYFPFGEGPRLCIGMRFAKMQITAGIITLLKKYRVELAPGMSEKVEFEPRSIITAPTGAIRLKFIPRDGWQQRVFKVASHKLPFRVLGLGPPGYEGPPTCVSNK

SEQ ID NO: 169 - DNA, 1650 bp, Spodoptera frugiperda
  source 1..1650: mol_type = other DNA
atgatcaccctgtacctgttgttggctattccattggccttgtatatcctgtacttgatctccatcagaaagtacagatactgggaacaaaagaaggttccacatttgccaccaaaaccatttttgggtaatttctccgagtacatcttgcagaaaaagcagttgggtagattggaacaagaattgtgtgaaatgttcccagaagaaccatacgttggtacttatttgggtactgaacctaccttgattatccaggatccagaattgattaaggccgttatgactaaggactactactacttttctggtagagaagcctctaactactgggacaaagaattggttactaggaacctgtttttctcctacggtgataattggaaggtccaaagacaaaacttgacccctttgttctcttcagctaagatgaagaatatgttccacttgattgaaaagtgcgccagagatttcgaaaacatgttggatcaagaagctcaaaccggtaaggatattgaagttagagctttgatgggcaagttcaccatggatgctattggtaattgtgtgttcggtattgaaactcgtactatggttaagaccgaaaacaacccattcaccaagattggtaacgttatcttcgacatcgattccttcaaggcttttaagtctgttgccagatctatttggccagctattttctatggtttgggttgtagaactcaaccagttgatatcgataacttcttcaccaacttgatgaccgaaactttcaagggtagagattacaagccaactaccagacatgatttcgttgacttgatgctgaagttgtacaatcaaagaactgttaccggtgactccatctcttctatgaagggtgatgaagctaagaaggttaccttggaaattgatgccgaattcttgatctctcagtgctttttgtttttcgctgctggttttgaaacttctgctactacattggcttacaccttgtttgaattggctaagaatccagaagcacaagctttggcaattcaagatgttgactcttacatgcagagaaacggtaacgttttgaagtacgaatgtgttaccgaattgccttacgttgaagcttgtgttaatgaagctttgaggttgtatccagttttgggtgttattaccagagaagtcgttgaagattacactttctctactggtttgaagttggagaagggtttgagaattcatttgccagttttccacatgcagcataacccaaagtattttccagatccagagcaattttccccagaaagatttttaggtgactgcaagcaaaacattaccccatacacttactttccatttggtgaaggtcctagattgtgcattggtatgagatttgccaagatgcaaattaccgctggtattatcactctgttgaagaagtacagagttgaattagctccaggtatgtccgaaaaggttgaatttgaacctagatccattattactgctccaaccggtgctattagattgaagtttattccaagagatggttggcagcagagagtttttaaagttgcttctcataagctgcccttcagagttttaggtttgggtccaccaggttatgaaggtccacctacttgtgtttctaacaagtga

SEQ ID NO: 170 - protein, 526 aa, Spodoptera frugiperda
MITLYLLLAIPLALYGVYLVSKRKFRYWEQKKVPHLPPKPILGNFSEYILQQKFYGRVEQEICNKFPEEPYVGSYLGTEPTLIIQDPEYIKTVMTKDYYFFSGREVSAYCEKEPLTQNLFFTYGDKWKVLRQNLTPLFSSAKMKNMFHLIEKCARIFENMVDQEVQKSKDIEVRALTGKFTMDAIGNCAFGVETQTMVKTDNNPFTRVGDVIFDTARMRALKGVLRSIWPAMFYSFGGKAVPADVDSFFFNLMTSIFKGRNYNPTSRNDFVDLLLKFHNNKTVTGDSMSNLKGSSGKKVSLEVDDEFLIAQCFLFFAAGYETSATTLSYTLYELAKNPEAQDLAIQDVDNYLRRNDNVLKYECVTELPYVEACVDEALRLYPVLGVITREVIEDYTFPTGLKLEKGLRVHLPVYHMQHNPNYFPEPEQYRPERFLSEEKKNIKPYTYFPFGEGPRLCIGMRFAKMQITAGIITLLKKYRVELAPGMSETIQFEPRSMITAPIGGIILKFIEREGWQQRVFKVPSEA

SEQ ID NO: 171 - DNA, 1581 bp, Spodoptera frugiperda
  source 1..1581: mol_type = other DNA
atgatcaccctgtacctgttgttggctattccattggcattatacggtgtctacttggtgtctaagagaaagtttagatactgggaacaaaagaaggttccacatttgccaccaaaacctattttgggtaatttctccgagtacatcttgcagcaaaagttctatggtagagtcgaacaagaaatctgcaacaagtttccagaagaaccttacgttggttcttatttgggtactgaacctaccttgattatccaagatccagagtacattaagaccgttatgaccaaggattactacttcttcagtggtagagaagtttctgcctactgtgaaaaagaaccattgactcagaacctgttctttacctatggtgataagtggaaggtcttgagacaaaacttgactcctttgttctcctcagctaagatgaagaatatgttccacttgattgaaaagtgcgccaggatctttgaaaacatggttgatcaagaagtccagaagtccaaggatattgaagttagagctttgactggtaagttcaccatggatgctattggtaattgtgctttcggtgttgaaactcaaactatggttaagaccgataacaacccattcactagagttggtgatgttattttcgataccgctagaatgagagccttgaaaggtgttttgagatctatttggccagccatgttttattcttttggtggtaaagctgttccagccgatgttgattctttcttctttaacttgatgacctccatcttcaagggtagaaattacaacccaacctccagaaacgatttcgttgatttgttgttgaagttccataacaacaagactgttaccggtgactctatgtctaatttgaaaggttcctctggcaagaaggtttccttggaagttgatgatgaattcttgattgcccagtgctttttgttttttgctgctggttacgaaacctctgctactactttgtcttataccttgtacgagttggctaaaaacccagaagctcaagatttggccattcaagatgttgacaactacttgagaagaaacgacaacgtcttgaagtacgaatgtgttactgaattgccatacgttgaagcttgtgttgatgaagccttgagattatatccagttttgggtgttatcaccagggaagttattgaggattacacttttccaaccggtttgaagttggaaaaaggtttgagagttcacttgccagtttaccatatgcaacataacccaaactacttcccagaaccagaacagtatagaccagaaagattcttgtccgaagagaagaagaacattaagccctacacttactttccatttggtgaaggtccaagattgtgcattggtatgagatttgccaagatgcaaattaccgctggtattatcactctgctgaaaaagtacagagttgaattggctccaggtatgtctgaaactattcaattcgaacccagatccatgattactgctccaattggtggtatcatcttgaagttcattgaaagagaaggttggcagcagagagtttttaaagttccatctgaagcctaa

SEQ ID NO: 172 - protein, 523 aa, Helicoverpa armigera
MITLLLSLVIPLIFFAIYITSKRKYEHWEKKKIPHLKPVPILGNFSEYILQKTYLGQVAQKICKKFPNEPFIGTYYGTEPALIVQDPELIKIVMTKDFYFFSGREVSDYSHKEMFTQNLFFTYGDRWKVLRQNLTPLFSSAKMKNMFHLIEKCSRVFEKVLDKETQKCDEIEVRALMAGFTMDCIGSCAFGVDTNVMEKTEDNIFRKIADLIFDIQGFRAFKNVARAIWPSVFYGLGFRAFPREIDNFFNNLMSGIFKGREYKPTNRNDFVDLVLKLSNNKTMTGDSLLNMKSDADKKVVLEVDEEMLVAQCVLFFAAGFETSSTTLSYALYELAMNPEAQEKALAEVDEYLRHHDNTLKYECVAGTPYLEACVDEALRLYPVLGLLTREVAEDYTFPSGLEVEKGLRVHLPVYHLHHHPEHFPDPEQFRPERFLAENKQNIKPYTYMPFGERPRICIGMRFARMQMAAGLITLLKKYRVELAPGMKRELVFEPGAIVTQPIGGIKLKFVERENWKERLLKTP

SEQ ID NO: 173 - DNA, 1572 bp, Helicoverpa armigera
  source 1..1572: mol_type = other DNA
atgatcaccctgttgctgtccttggttattccattggtttttttcgccatctacatcacctctaagagaaagtatgaacactgggagaagaagaagatcccacatttgaaaccagttccaatcttgggtaatttctccgagtacatcttgcaaaagacttacttgggtcaagttgctcaaaagatctgcaagaagtttccaaacgaaccattcattggtgcttactatggtactgaaccagctttgatagttcaagacccagaattgatcaagatcgttatgaccaaggacttctacttcttcagtggtagagaagtctctaactactcccacaaagaaatgttcacccagaacttgtttttcacctatggtgatagatggaaggtcttgagacaaaacttgactcctttgttctcctcagctaagatgaagaatatgttccacttgatcgaaaagtgctccagagtttttgaaaaggtgttggacaaagaaacccaaaagtgcgacgaaattgaagttagagctttgatggctggtttcaccatggattgcattggttcttgtgcttttggtgttgataccaacgttatggaaaagaccgaaaacaacatcttcagaaagatcgccgatttgatcttcgatatccaaggtttcagagcctttaagaatgttgctagagctatttggccatccgttttttatggtttgggttttagagcattcccaagggaaattgacaacttcttcaacaacttgatgtccggtattttcaagggtagagagtacaagccaactaacagaaacgatttcgttgacttggtcctgaagttgtctaacaacaaaactatgaccggtgactccttgttgaacatgaagtctgatgctgataagaaggttgttttggaagtcgatgaagagatgttggttgctcaatgtgttttgttttttgctgccggttttgaaacctcttctactactttgtcttacgccttgtacgaattggctaaaaatccagaagctcaagaaaaggctttggccgaagttgatgaatatttgagaaggcatgataacaccttgaagtacgaatgtgttgctggtactccatatttggaagcttgtgttgatgaagctttgaggttgtatccagtattgggtttgttgactagagaagttgctgaggattacacttttccatctggtttggaagttgagaagggtttgagagttcatttgccagtttatcacttgcatcatcatccagaacatttcccagatcctgaacaattcagaccagaaagatttttggctgagaacaagcaaaacatcaagccatatacttacatgccatttggtgaaggtccaagaatctgtattggtatgagattcgctagaatgcaaatggctgctggtttgttaaccctgttgaaaaagtacagagttgaattggctccaggtatgaagagagaattggttttcgaaccaggtgctatagttactcaacctattggtggtatcaagttgaagttcgtcgaaagggaaaattggaaagagaggttgttgaaaaccccataa

SEQ ID NO: 174 - protein, 526 aa, Spodoptera frugiperda
MITLYLLLAIPLALYGVYLVSKRKFRYWEQKKVPHLPPKPILGNFSEYILQQKFYGRVEQEICNKFPEEPYVGSYLGTEPTLIIQDPEYIKTVMTKDYYFFSGREVSAYCEKEPLTQNLFFTYGDRWKVLRQNLTPLFSSAKMRNMFHLIEKCARIFENMVDQEVQKGKDIEVRGLTAKFTMDAIGNCAFGVETQTMVKTDNNPFTRVGDVIFDTARMRALKGVLRSIWPAMFYSFGGKAVPADVDSFFFNLMTSIFKGRNYNPTSRNDFVDLLLKFHNNKTVTGDSMRNLKGDSGKKVSLEVDDEFLIAQCFLFFAAGYETSATTLSYTLYELAKNPEAQELAIQDVDNYLRRNDNVLKYECVTELPYVEACVDEALRLYPVLGVITREVIEDYTFPTGLKLEKGLRVHLPVYHMQHNPNYFPEPEQYRPERFLGEEKKNIKPYTYFPFGEGPRLCIGMRFAKMQITAGIITLLKKYRVELAPGMSETIQFEPRSVITAPIGGIRLKFIEREGWQQRVFKVPSEA

SEQ ID NO: 175 - DNA, 1581 bp, Spodoptera frugiperda
  source 1..1581: mol_type = other DNA
atgatcaccctgtacctgttgttggctattccattggcattatacggtgtctacttggtgtctaagagaaagtttagatactgggaacaaaagaaggttccacatttgccaccaaaacctattttgggtaatttctccgagtacatcttgcagcaaaagttctatggtagagtcgaacaagaaatctgcaacaagtttccagaagaaccttacgttggttcttatttgggtactgaacctaccttgattatccaagatccagagtacattaagaccgttatgaccaaggattactacttcttcagtggtagagaagtttctgcctactgtgaaaaagaaccattgactcagaacctgttcttcacttatggtgatagatggaaggtcttgagacaaaacttgactcctttgttctcttcagccaagatgagaaacatgttccacttgattgaaaagtgcgccagaatcttcgaaaacatggttgatcaagaagtccagaaaggtaaggatatcgaagttagaggtttgactgctaagttcaccatggatgctattggtaattgtgctttcggtgttgaaactcaaactatggttaagaccgataacaacccattcactagagttggtgatgttattttcgataccgctagaatgagagctttgaagggtgttttgagatctatttggccagctatgttttactcttttggtggtaaagctgttccagccgatgttgattcttttttcttcaacttgatgacctccatcttcaagggtagaaattacaacccaacctccagaaacgatttcgttgatttgttgttgaagttccataacaacaagactgttaccggtgactctatgagaaacttgaaaggtgattctggcaagaaggtttccttggaagttgatgatgaattcttgattgcccagtgctttttgttttttgctgctggttacgaaacctctgctactactttgtcttataccttgtacgagttggctaagaatccagaagctcaagaattggccattcaagatgttgacaactacttgagaagaaacgacaacgtcttgaagtacgaatgtgttactgaattgccatacgttgaagcttgtgttgatgaagccttgagattatatccagttttgggtgttatcaccagggaagttattgaggattacacttttccaaccggtttgaagttggaaaaaggtttgagagttcacttgccagtttaccatatgcaacataacccaaactacttcccagaaccagaacagtatagaccagaaagatttttgggcgaagagaagaagaacattaagccctatacttacttcccatttggtgaaggtccaagattgtgtattggtatgagattcgccaagatgcaaattaccgctggtattattaccctgctgaaaaagtacagagttgaattggctccaggtatgtctgaaactattcaattcgaacctagatccgttattaccgctccaattggtggtattagattgaagttcatcgaaagagaaggttggcaacagagagtttttaaggttccatctgaagcctga

SEQ ID NO: 176 - protein, 517 aa, Helicoverpa armigera; identical to SEQ ID NO: 148

SEQ ID NO: 177 - DNA, 1554 bp, Helicoverpa armigera; identical to SEQ ID NO: 149
  source 1..1554: mol_type = other DNA

SEQ ID NO: 178 - protein, 524 aa, Depressaria pastinacella
MSVILILSSILTLLITSIYLISTRKFNYWKKKNVPHLKPKLILGNYGDFLLMKKPNGLVVQEICQAFPNEPYIGAYYGTEPALIVQDAEIIKLITIQDFSYFNSREVGDHTHKEDMSKNIFSTNGDRWKVVRQHMTPLFTSSKMKNMFHLIEKCSHEFERMLDREFKMSNVQEVRALTARFTMDCIVSCGFGLDANTMGDNSKENPFTKLSNSIFEVSNLRFLAMQARNLWPSIFYGLGLRTFPKSIDDFFHELITNVFKQRQYTPTSRNDFVDLIMNWTKKDYLTADSFKHDKEKGSTKISLKVDDKLLVAQCSIFFGAGHETSATTLSYTLFELAKNPEAQKRAIEEVDAYLLKNNNKLGYDCVTELPFLEACLDETLRLYPVLSVLTREVVEDYTLPTGLHLDKGVRIHLPLYHLHHNPDNFPEPEKYRPERFVGDERKNIKPYTYMPFGEGGRTCIGMRFSKMQTLSGLVTFLKKYRVELAKGTSPTVEFEPRALVFISKNGINLQMMEREGWEKRLFAK

SEQ ID NO: 179 - DNA, 1575 bp, Depressaria pastinacella
  source 1..1575: mol_type = other DNA
atgtccgtcatcctgatcctgtcctctattttgactttgttgatcacctccatctacctgatttctaccagaaagtttaactactggaagaagaagaacgtcccacatttgaagccaaagttgattttgggtaactacggtgacttcctgttgatgaagaaacctaatggtttggtcgttcaagaaatctgtcaagcttttccaaacgaaccttacattggtgcttattacggtactgaaccagctttgatagttcaagatgccgaaatcatcaagctgatcaccattcaagatttcagctacttcaactccagagaagttggtgatcatacccacaaagaagatatgtccaagaacatcttttccaccaatggtgatagatggaaggttgttagacaacatatgacccctttgttcacctcttctaagatgaagaatatgttccacttgatcgagaagtgctcccatgaatttgaaagaatgttggacagggaattcaagatgtctaacgtccaagaagttagagctttgactgctagattcactatggattgcatagtttcttgtggtttcggtttggatgctaacactatgggtgataactctaaagaaaaccccttcaccaagctgtccaactctatttttgaagtctccaacttgagattcttggctatgcaagctagaaatttgtggccatctattttctacggtttgggcttgagaactttcccaaagtctatcgatgatttcttccacgagttgattaccaacgtgtttaagcaaagacagtacactccaacctctagaaacgatttcgttgacttgattatgaactggaccaagaaggattacttgaccgccgattcttttaagcacgacaaagaaaaaggttccaccaagatttctttgaaggttgacgataagttgttggttgctcaatgctccatttttttcggtgctggtcacgaaacatctgctactactttgtcttacaccttgttcgaattggctaagaatccagaagctcaaaagagagctattgaagaagttgacgcttacctgttgaagaacaacaacaaattgggttacgattgcgttaccgaattgccatttttggaagcttgtttggacgaaactttgaggttgtatccagttttgtctgtcttgactagagaagtcgttgaggattatactttgccaaccggtttacatttggataagggtgttagaattcacttgccattataccacttgcatcacaacccagataattttccagaaccagaaaagtacagaccagaaagatttgttggtgacgagagaaagaacattaagccatatacttacatgccattcggtgaaggtggtagaacttgtattggtatgagattctctaagatgcagaccttgtctggtttggttactttcctgaagaagtacagagttgaattggccaaaggtacttctccaactgttgaattcgaacctagagccttggttttcatttctaagaacggtatcaacctgcagatgatggaaagagaaggttgggaaaagagactgttcgctaagtaa

SEQ ID NO: 180 - protein, 526 aa, Spodoptera frugiperda; identical to SEQ ID NO: 170

SEQ ID NO: 181 - DNA, 1581 bp, Spodoptera frugiperda; identical to SEQ ID NO: 171
  source 1..1581: mol_type = other DNA

SEQ ID NO: 182 - protein, 523 aa, Bombyx mori
MSVSALVFSAFVLLVTYIYYWSTRKFDYWKRKNVPYAKPVPFFGNYMRYITLQSFLGDVMQKLCQQFPDRPYFGSFYGTEPALVLQNPEIIKQVFTKDFYYFNSRENRDYNHKEVFTQNLFFANGDRWKVIRQNLTPLFSSSKMKNMFYLVEKCNHSLEDMLDKETKDLQSIEIRSAMIRYTLDSICSSAFGIETNTLSEGAENSPFPSMGSTIFSSSITRGLKLIGRSMWPGIFYKLGLRCFPTEIDDFFERLLTEVFENRGYKPTNRNDFVDLILSLKQNDYLTGDGLVPKNVDAKKVTVKVDDALLIAQCVVFFGAGFETSATTLSAALYELAKNPEAQRRAQEEVDELLLKHNNKLNYDCLAELPYLEACMNEAMRLYPVFPNITRETVADYTFPDGLRIDKGMRVHVPVYAIHRNPDNFPDPEEFRPERHLGDAKNDIKQFTFFPFGEGPRICIGMRFGKMQTIAGLITCLKKFNFELADGMPRTLAFRSTTLLTQPSTGLFLKATPRDGWEQRIFAR

SEQ ID NO: 183 - DNA, 1572 bp, Bombyx mori
  source 1..1572: mol_type = other DNA
atgtccgtttccgctttggttttctctgcttttgttttgttggtcacctacatctactactggtctactagaaagttcgactactggaagagaaagaatgttccatacgctaagccagttccatttttcggtaactacatgaggtacatcaccttgcaatctttcttgggtgatgtcatgcaaaagttgtgtcaacaatttccagacagaccatacttcggttctttttatggtactgaaccagctttggtcttgcaaaacccagaaattatcaagcaggttttcaccaaggacttctactactttaactccagggaaaacagagactacaaccacaaagaagttttcacccagaatttgttcttcgccaatggtgatagatggaaggttatcagacaaaacttgacccctttgttctcctcatctaagatgaagaatatgttctacttggtcgagaagtgcaaccactctttggaagatatgttggacaaagagactaaggacttgcagtccattgaaattagatccgccatgattagatacaccttggactctatttgttcctccgcttttggtattgaaacgaacactttgtctgaaggtgctgagaattcaccatttccatcaatgggttctaccatcttctcatcctctattactagaggcttgaagttgatcggtagatctatgtggccaggtattttctacaaattgggtttgagatgtttcccaaccgaaatcgatgatttcttcgaaaggttgttgaccgaagtgtttgagaatagaggttacaagccaactaacagaaacgatttcgttgacctgatcttgtccttgaagcaaaacgattatttgaccggtgatggtttggttccaaaaaacgttgatgctaagaaggttaccgttaaggttgatgatgctttgttgattgctcaatgcgttgttttttttggtgccggttttgaaacttctgctactacattgtctgctgccttgtatgaattggctaaaaatccagaagctcaaagaagggctcaagaagaagttgacgaactgttgttgaaacacaacaacaagttgaactacgattgcttggctgaattgccatatttggaagcttgcatgaatgaagctatgaggttgtatccagttttcccaaacattaccagagaaaccgttgctgattacacttttccagatggtttgaggattgacaagggtatgagagttcatgttccagtttacgccattcatagaaacccagataactttccagatccagaagaattcagaccagaaagacacttaggtgatgccaagaatgatatcaagcaattcacattcttcccattcggtgaaggtccaagaatctgtattggtatgagattcggtaagatgcaaaccattgctggtttgattacctgcctgaagaagtttaatttcgaattggctgatggtatgcctagaactttggcttttagatctactaccttgttgactcaaccatccactggtttgtttttgaaagctactccaagagatggttgggaacaaagaatttttgccaggtga

SEQ ID NO: 184 - protein, 516 aa, Bombyx mandarina
MVAMDRHETPRYNHQLYVYYITKRNHDYWKNKKVPFEKPYPILGNYGDYILLKNFFGNVTKRLCEKFPESPYVGTFYGTEPALVVQDPDLIRLILVKDFFYFHGREVCKYVDREITTQSIFFTYGDDWRVLRHSLTPLFTTSKMKNMFHLIKNCCRVFENVLEEKATVKSFEINSIIKYFIMDCVGACLFGVEINAMEKHSQNPIVKISKEIFPKSTTRGIINVLRGIWPSLFYALRLKLFPEVITMFFTDLLECAFKDRQRNLSQRQDFIDLFMKLRQIKYLVGDSIRIIKNGRVQKVNLGVTDELLIAQCVSFLGAAFETPSTTLSTTFYDLAKNPKYQKRAIESDDNYFASNMNEIEFDSRIDDAACRLLSDETLRLLPSLANLTREVMEDYTFPTGLKVEKGTRIHIPVYHLQRNPKYFPEPNKFDPRRFLPEAKQTIYPFTYMPFGEGHRMCIAMRFAKMQMLAGFATLLKKYEVAVDDTTPQELTIDPRIIVTTPIENIQLKLIARQHAL

SEQ ID NO: 185 - DNA, 1551 bp, Bombyx mandarina
  source 1..1551: mol_type = other DNA
atggttgccatggatagacacgaaactccaagatacaaccatcagttgtacgtttactacatcaccaagagaaaccacgattactggaagaacaagaaggttccattcgaaaagccatatccaatcttgggtaattacggtgactacatcctgctgaagaatttctttggtaacgtgaccaagagattgtgcgaaaagtttccagaatctccatacgttggtactttctatggtactgaaccagctttggttgttcaagatccagatttgatcagactgatcttggttaaggacttcttctacttccatggtagagaagtctgtaagtacgttgatagagaaatcactacccagtccattttcttcacttatggtgatgattggagagtcttgagacattctttgacccctttgttcactacctctaagatgaagaatatgttccacctgattaagaactgctgcagagtttttgaaaacgtcttggaagaaaaggccaccgttaagtcttttgagatcaactccattatcaagtatttcatcatggattgcgttggtgcttgtttgtttggtgttgaaatcaacgccatggaaaagcactctcaaaatccaatcgtcaagatcagcaaagagatcttcccaaagtctactaccagaggtattatcaacgttttgagaggtatttggccctctttgttttacgctttgagattgaagttgttccctgaggttattaccatgttcttcaccgatttgttggaatgcgctttcaaggatagacagagaaacttgtctcaaagacaagacttcatcgacctgttcatgaagttgagacagattaagtacttggtcggtgactccattagaatcattaagaacggtagagtccaaaaggttaacttgggtgttaccgatgaactgttgattgctcaatgtgtttcttttttgggtgctgcttttgaaactccatctactactttgtctaccaccttttacgatttggctaagaaccctaagtaccaaaagagggctattgaatccgatgataactacttcgcttccaacatgaacgaaatcgagttcgactctagaattgatgatgctgcttgcagattattgtctgacgaaactttgagactgttgccatctttggctaacttgactagagaagtgatggaagattacactttcccaactggtttgaaggttgaaaagggtactagaattcacatcccagtttaccacttgcaaagaaacccaaagtatttcccagaacctaacaagttcgatcccagaagatttttgccagaagctaagcaaactatctacccattcacttacatgccatttggtgaaggtcatagaatgtgcattgctatgagattcgctaagatgcaaatgttggctggttttgctactctgttgaagaaatacgaagttgccgttgatgataccactccacaagaattgactatcgatccaagaatcatcgttactaccccaatcgaaaacatccagttgaaattgattgctagacaacacgccttgtaa

SEQ ID NO: 186 - protein, 513 aa, Zygaena filipendulae
MVWMMLLLIVLVVILYYIATFKHDYWKKRGVPYLQPSLVFGNYRDFILMRKNMGEVAESICKEFPDAPVVGTFYGTDPALIVKDPELIKLITTKDFYYFSGRENSDHINKEMFIKNLFFSYGDYWKVVRQNLTSLFSTSKMKTMFYLIEKCTTQMHNLLEIETKTDDILEVKSFITRFTMDCIGSCVFGVETDAMGKDNNRNPFRAISDKIFDFGISRTLKTIGRAMWPGIFYGLGYKLLPDDVESFFDNLLNGVFEQRNHEPTARNDFIDLILKFSKNKCITGDSIKTTKVKDEQTKVSVEVEKDFLVSQCFLFFAAGFETTASTLTFTLYELAKNEKAQKLVIQEVDEYLRQRDGKLEYDCVSQLPYLDACVNEALRLYPVLTILTREVTDDYTLPTGLRLEKKTRIHFPMLYIHKNPEYFPNPEEYRPERHLPGERNNIKACTFFPFGEGPRMCIGMRFAKMMMASCLVTFFRRYRVELAEGMPSTVQLHPRYLGSQSINGVKLKFLKRF

SEQ ID NO: 187 - DNA, 1542 bp, Zygaena filipendulae
  source 1..1542: mol_type = other DNA
atggtctggatgatgctgttgttgatcgttttggttgtcatcttgtactacattgctaccttcaaacacgactactggaaaaaaagaggtgtcccatacttgcaaccatctttggtttttggtaactacagggacttcatcctgatgagaaagaatatgggtgaagttgctgagtccatctgtaaagaatttccagatgctccagttgtcggtactttttatggtactgatccagctttgatcgttaaggatccagaattgattaagctgatcaccaccaaggatttctactacttttctggtagagaaaactccgaccacatcaacaaagaaatgttcatcaagaacctgttcttctcctatggtgattactggaaggttgtcagacaaaacttgacctctttgttctctacctctaagatgaagaccatgttctacttgattgagaagtgcactacccaaatgcacaacttgttggaaattgaaactaagaccgacgacatcttggaagtcaagtctttcattactagattcaccatggattgcatcggttcttgtgtttttggtgttgaaactgatgctatgggcaaagacaacaatagaaatccattcagagccatctccgataagattttcgatttcggtattagcaggaccttgaaaactattggtagagctatgtggccaggtattttctatggtttgggttataagttgttgccagatgacgttgaatccttcttcgataatttgttgaacggtgtgttcgagcaaagaaaccatgaacctactgctagaaacgatttcatcgacttgatcctgaagttctctaagaacaagtgtattaccggtgactctattaagactaccaaggttaaggacgaacagaccaaagtttctgttgaagttgaaaaggacttcctggtttctcaatgctttttgttttttgctgccggttttgaaactaccgcttctactttgactttcaccttgtacgaattggccaaaaacgaaaaggctcaaaagttggttatccaagaagtcgacgaatacttgagacagagagatggtaaattggaatacgactgtgtttcccaattgccatatttggatgcttgtgttaatgaagccttgaggttgtatccagttttgactattttgaccagagaagttaccgatgattacactttgccaactggtttgaggttggaaaagaaaaccagaattcacttccccatgttgtacatccataagaacccagaatacttcccaaatccagaagagtatagaccagaaagacatttgccaggtgaacgtaacaatattaaggcttgtacattcttcccattcggtgaaggtccaagaatgtgtattggtatgagattcgctaagatgatgatggcttcttgtttggttaccttcttcagaagatacagagttgaattggctgaaggtatgccatctactgttcaattgcatccaagatacttgggttcccaatctattaacggtgtcaagttgaagttcctgaagaggttctaa

SEQ ID NO: 188 - protein, 523 aa, Bombyx mori
MSVSALVFSAFVLLVTYIYYWSTRKFDYWKRKNVPYAKPVPFFGNYMRYITLQSFLGDVMQKLCQQFPDRPYFGSFYGTEPALVLQNPEIIKQVFTKDFYYFNSRENRDYNHKEVFTQNLFFANGDRWKVIRQNLTPLFSSSKMKNMFYLVEKCNHSLEDMLDKETKDLQSIETRSAMIRYTLDSICSSTFGIETNTLSEGAENSPFPSMGSTIFSSSITRGLKLIGRSMWPGIFYKLGLRCFPTEIDDFFERLLTEVFENRGYKPTNRNDFVDLILSLKQNDYLTGDGLVPKNVDAKKVTVKVDDALLIAQCVVFFGAGFETSATTLSAALYELAKNPEAQRRAQEEVDELLLKHNNKLNYDCLAELPYLEACMNEAMRLYPVFPNITRETVADYTFPDGLRIDKGMRVHVPVYAIHRNPDNFPDPEEFRPERHLGDAKNDIKQFTFFPFGEGPRICIGMRFGKMQTIAGLITCLKKFNFELADGMPRTLAFRSTTLLTQPSTGLFRKATPRDGWEQRIFAR

SEQ ID NO: 189 - DNA, 1572 bp, Bombyx mori
  source 1..1572: mol_type = other DNA
atgtccgtttccgctttggttttctctgcttttgttttgttggtcacctacatctactactggtctactagaaagttcgactactggaagagaaagaatgttccatacgctaagccagttccatttttcggtaactacatgaggtacatcaccttgcaatctttcttgggtgatgtcatgcaaaagttgtgtcaacaatttccagacagaccatacttcggttctttttatggtactgaaccagctttggtcttgcaaaacccagaaattatcaagcaggttttcaccaaggacttctactactttaactccagggaaaacagagactacaaccacaaagaagttttcacccagaatttgttcttcgccaatggtgatagatggaaggttatcagacaaaacttgacccctttgttctcctcatctaagatgaagaatatgttctacttggtcgagaagtgcaaccactctttggaagatatgttggacaaagagactaaggacttgcagtctattgaaaccagatccgctatgattagatacaccttggattccatctgttcttccactttcggtattgaaactaacaccttgtctgaaggtgctgagaattcaccatttccatcaatgggttctaccatcttctcatcctctattactagaggcttgaagttgatcggtagatctatgtggccaggtattttctacaaattgggtttgagatgtttcccaaccgaaatcgatgatttcttcgaaaggttgttgaccgaagtgtttgagaatagaggttacaagccaactaacagaaacgatttcgttgacctgatcttgtccttgaagcaaaacgattatttgaccggtgatggtttggttccaaaaaacgttgatgctaagaaggttaccgttaaggttgatgatgctttgttgattgctcaatgcgttgttttttttggtgccggttttgaaacttctgctactacattgtctgctgccttgtatgaattggctaaaaatccagaagctcaaagaagggctcaagaagaagttgacgaactgttgttgaaacacaacaacaagttgaactacgattgcttggctgaattgccatatttggaagcttgcatgaatgaagctatgaggttgtatccagttttcccaaacattaccagagaaaccgttgctgattacacttttccagatggtttgaggattgacaagggtatgagagttcatgttccagtttacgccattcatagaaacccagataactttccagatccagaagaattcagaccagaaagacacttaggtgatgccaagaatgatatcaagcaattcacattcttcccattcggtgaaggtccaagaatctgtattggtatgagattcggtaagatgcaaaccattgctggtttgattacctgcctgaagaagtttaatttcgaattggctgatggtatgcctagaactttggcttttagatctactaccttgttgactcaaccatccactggtttgtttagaaaagctactccaagagatggttgggaacaaagaatttttgccaggtga

SEQ ID NO: 190 - protein, 515 aa, Bombyx mori
MILTIIFILSLCVYILYRISTRKFDYWQKKNVSYVEPAPFLGNYSGYILLKENLLDVVHNLSKLFPNDPYVGAFFGTKPTLIVKDPEFIKLVLIKDFYYFHGREGSKYTHNEVITQGIFFTYGDRWKVIRQNLTPLFSSSKIRNMFRTIEKCSGVFENLLDEESLAPEVEMRSVMSRFTMDCIGGCAFGVDTNAMQEPKDNIFKTMGYLFFESTTRRGIKNVFKAIWPEIFYGLGFKVFPTDLNEFFSKLLVGIFEARDYKPSSQNVFINLLLNLKKNRHIVGDRLLKIKTGNVRAESKIKLEVDDELLVSQCVAFFIAGFETSSTISRFTLYELAKNPDVQKRAQKEVDEYIKKHNNKLDYDCVKELPFVEACIDEALRLYPVLGVLTREVMEQYTFPTGLTLDKGDRVHIPVYHLHRDPEYFPEPELFKPERFCGEEKRNIRPFTYLPFGAGPRTCIGQRFAKMQMLAGLVTILKRYTVCLAEGMPETINFEQRAIVTQPNIGIRLNLLPRNN

SEQ ID NO: 191 - DNA, 1548 bp, Bombyx mori
  source 1..1548: mol_type = other DNA
atgatcctgaccatcatcttcatcttgtccttgtgtgtttacatcctgtacagaatctctaccagaaagttcgattactggcagaaaaagaacgtgtcttatgttgaaccagctccatttttgggtaactactctggttacatcttgctgaaagaaaacttgttggatgtcgtccacaacctgtctaagttgtttccaaatgatccatacgttggtgctttctttggtactaagccaactttgattgtcaaggacccagaattcatcaagctggttttgatcaaggacttctactacttccatggtagagaaggttctaagtacacccataacgaagttattacccagggtattttcttcacctatggtgatagatggaaggtcatcagacaaaacttgactcctttgttctccagctccaagattagaaacatgttcagaaccatcgaaaagtgctctggtgtctttgagaacttgttagacgaagaatctttggcccctgaagttgaaatgagatctgttatgtctagattcaccatggattgcattggtggttgtgcttttggtgttgatacaaatgctatgcaagaacccaaggacaacattttcaaaaccatgggttacctgttcttcgaatctactactagaagaggtatcaagaacgttttcaaggctatttggccagaaatcttttacggtttgggtttcaaggttttcccaactgatttgaacgagttcttctcaaagttgttggtcggtattttcgaagccagagattacaaaccatccagccaaaatgttttcatcaacctgttgctgaacctgaagaagaacagacatatagttggtgaccgtctgttgaagattaagactggtaatgttagagccgagtccaagatcaaattggaagttgatgacgaactgttggtttctcaatgtgttgcttttttcattgccggtttcgagacttcttctaccatttccagattcaccttgtacgaattggctaagaatccagatgttcaaaagagagcccaaaaagaagttgacgagtacattaagaagcacaacaacaagttggattacgactgcgtaaaagaattgccattcgttgaagcttgcattgatgaagccttgagattatatccagttttgggtgttttgaccagggaagttatggaacagtacacttttccaacaggtttgactttggataagggtgatagagttcatatcccagtttaccacttgcatagagatccagaatattttccagaaccagagttgttcaagccagaaagattttgtggtgaagagaagagaaacatcagaccattcacttacttgccatttggtgctggtccaagaacttgtattggtcaaagatttgccaagatgcaaatgttggctggtttggttactatcctgaagagatacactgtttgtttggctgaaggtatgccagaaaccattaactttgaacaaagagctatcgttacccagccaaatattggtatcagattgaacttgctgccccgtaacaactaa

SEQ ID NO: 192 - protein, 522 aa, Cnaphalocrocis medinalis
MLPIYLILCVAVIYCLYRLATLKYNYWKKRNVPHPPPTPVLGNYGPYLLMQKYYGQVAQEICQKYPNAPYIGAYYGTEPTLIVQDPELIKIITTKDFYYFNSREISEHTHKEVTTQNLFFTYGDQWKAVRQKMTPLFSSAKMRNMFPLIAKCSVSFQEHVDQETSSSDVIDVKSLMARYTMACIVSCAFGAEVDTLTPEGKDSQFVKIGKLIFLNSYLRGGLTVFRAIWPTLFYKLGLKNFPDEMTNFFKRFVTNVFEARKYTPTRRNDFVDLLLNLRQQKSIVADSLSNGKTGREDKVELPVTDDLLVSQCVLFFAAGFETSSTATSFLLYELSKKPEIQERVLQEVDAFLAKHDNKLTYDCVTELPYTQACIDESLRLHPPLGVITREVMEEYTLPDGLVLEKGVRIHLPVYGLHYNPDHFPDPEEFRPERFEGSNRNNIKSHTYIPFGDGSRICIGLRFAKMQMLAGLISLLKKYRVEMTKDTPTKLDYDPRALVTIPLQSVNLKLVPREGWEKRIFVQ

SEQ ID NO: 193 - DNA, 1569 bp, Cnaphalocrocis medinalis
  source 1..1569: mol_type = other DNA
atgctgcccatctacttgattttgtgcgttgctgttatctactgcttgtacagattggctactctgaagtacaactactggaagaaaagaaacgttccacatccaccaccaactccagttttgggtaattatggtccatatctgctgatgcaaaagtactatggtcaagttgctcaagagatctgtcaaaagtatccaaacgctccatatattggtgcttattacggtactgaacctaccttgatagttcaagatccagagttgattaagatcatcaccaccaaggatttctactacttcaactccagagaaatctctgaacacacccacaaagaagttaccactcaaaacttgttcttcacctatggtgatcaatggaaggctgttagacaaaagatgactcctttgttctcttcagccaagatgagaaatatgttcccattgattgctaagtgctccgtgtcttttcaagaacacgttgatcaagaaacctcttcctccgatgttatcgatgttaagtctttgatggctagatacaccatggcttgtatagtttcttgtgcttttggtgctgaagttgatactttgactccagaaggtaaggattcccaattcgttaagatcggtaagctgatcttcctgaactcttatttgagaggtggtttgactgttttcagagctatttggccaactctgttttacaagttgggtttgaagaatttcccagacgaaatgaccaacttcttcaagagatttgtgaccaacgttttcgaagctagaaagtacactccaaccagaagaaacgatttcgttgacttgttgttgaacttgagacagcaaaagtctatcgttgccgactctttgtctaatggtaaaactggtagagaagataaggtcgaattgccagttactgacgatttgttggtttctcaatgcgttttgtttttcgctgctggttttgaaacttcttctactgctacttccttcctgttgtacgaattgtctaagaagccagaaatccaagaaagagtgttgcaagaagttgacgctttcttggctaaacacgataacaagttgacctacgattgtgtcactgaattgccatatactcaagcctgcattgacgaatctttgagattgcatccaccattgggtgttattaccagagaagttatggaagagtacactttgccagatggtttggttttggaaaagggtgttagaatccatttgccagtttacggcttgcattacaatccagatcattttccagatcctgaagaattcagaccagaaagatttgagggttccaacagaaacaacatcaagtcccatacttacatcccatttggtgatggttctagaatctgcattggtttgagattcgctaagatgcaaatgttggctggtttgatctctctgttgaaaaagtacagagttgagatgactaaggacaccccaactaagttggattatgatccaagagctttggtcaccattccattgcaatctgttaacttgaagctggttccaagagaaggttgggaaaagagaattttcgtccaatag

SEQ ID NO: 194 - protein, 516 aa, Spodoptera exigua
MIFLYVLLLLLFLFYYFVTRKNDYWKKRNVPHCKPTFLFGSYAEMVLGKKFNGYIIDEMCKQFPDDKYIGAFHGLKPVLIPKDPEIIKLIVTKDFYYFHGRALSKYNDKEPGGLNLFGTYGDNWRVIRQNMTPLFTSAKMRNMFHLIEKCSHEYEAMIDREIKISKEHDVMPMTTRFTMDCIGACAFGIDTKTMTEGEDENPFRRIIRGSKPNKRMIYQGMLRYLCPELYYALGFKMPSTQLDFLHKLITSVMNQRGNKPSERNDFVDLIMSWKQKQHIVGDSIRNMKTKVALEASDDLLIAQCYVFFAAGFKTSTTALSYTLYEIAKHEDIQNKVFKEIDSYLARHNNKLNYDCVMELPYLDAVIDETFRVYPVLSTIPRELMEDYTMPDGTKLDKGIGVELPVYHLRHNPKFYPEPEVFRPERFLGEEKKNINPYVYLPFGEGPRVCIGMRFAKMQMLAGLITMLKKYRLELADGMPTKLKFKAQSFITHPVGGIKIKFIEREGWESRVFAKDN

SEQ ID NO: 195 - DNA, 1563 bp, Spodoptera exigua
  source 1..1563: mol_type = other DNA
atgatcttcctgtacgtcctgctgttgctgttgtttttgttctactacttcgtcaccagaaagaacgactactggaaaaagagaaatgttccacattgcaagcccacttttttgtttggttcttacgctgaaatggtcctgggtaaaaagttcaacggttacattattgacgagatgtgcaagcaattcccagatgataagtacattggtgctttccatggtttgaagccagttttgattccaaaggatccagagatcatcaagttgatcgttaccaaggacttttactacttccatggtagagctttgtctaagtacaacgacaaagaaccaggtggtttgaatttgttcggtacttatggtgataattggagagtcatcagacaaaacatgactcctttgttcacttccgctaagatgagaaacatgttccacttgattgaaaagtgctcccatgaatacgaagccatgattgatagagagatcaagatctccaaagaacacgatgttatgccaatgactactagattcaccatggactgtattggtgcatgtgcttttggtattgataccaagactatgactgaaggtgaggacgaaaatccattcagaagaattatcagaggctccaagcctaacaagagaatgatctatcaaggtatgttgaggtacttgtgtccagagttgtattatgctttgggtttcaagatgccatccactcaattggatttcttgcataagttgatcacctctgtcatgaatcagagaggtaacaaaccatccgaaagaaacgatttcgttgacttgattatgtcctggaagcaaaagcaacatatcgttggtgattccatcagaaacatgaagactggtgaaaacgaaaaggttgctttggaagcttctgacgatttgttgattgctcaatgctacgtttttttcgctgctggttttaagacttctactaccgctttgtcttacaccttgtacgaaattgctaagcacgaagatatccagaacaaggtgttcaaagaaatcgactcttacttggccagacacaacaacaagttgaactacgattgtgtcatggaattgccatacttggatgctgttatcgacgaaacttttagagtttacccagtcttgtctaccattccaagagaattgatggaagattacactatgccagacggtactaagttggacaaaggtattggtgttgaattgccagtttaccacttgagacataacccaaaattctacccagaaccagaagttttcagaccagaaaggtttttgggtgaagagaaaaagaacatcaacccctatgtttacttgccatttggtgaaggtccaagagtatgtattggtatgagatttgccaagatgcaaatgttggctggtttgattactatgctgaagaagtacagattggaattggctgatggtatgccaacgaagttgaaattcaaggcccaatctttcattacccatccagttggtggtatcaagatcaagttcattgaaagagaaggttgggagtctagagttttcgctaaggataactga

SEQ ID NO: 196 - protein, 517 aa, Bombyx mori; identical to SEQ ID NO: 164

SEQ ID NO: 197 - DNA, 1554 bp, Bombyx mori; identical to SEQ ID NO: 165
  source 1..1554: mol_type = other DNA

SEQ ID NO: 198 - protein, 523 aa, Rhizopus microsporus
MNSLINIYTTSFKRLLPLIKDRSKTLCITAAILLVALQQIRSFFYVPKSIRSIPKVSYLSMAISFLYREGPPERLKRLKLPAMRKGNGFYLSRIPFGWTVYVANPIAAKQLLLKAENFPKSHFLMETVGKDSPFVQFLGPDNVVNSNGENWKKQRKVMNPAFHRSMPVKTIAGVIPTLFAVIDKYEGKVPVTSIMQEFTLDVLGLAIFDFDFGSLKGDAEKWRAEYKLVMETLFDPVTNVFTGLDFLLRYVYPKRIRGAKAVNNLNKLFDKLVKEKRLEVQNGVHVNKPQDEKDLLTLMLEAEQKGEAMTTDMEMRHNVAVFFLAGHESTAHVLSFTLYFLAKNKHVQQKLREEVNRVMGRESVDAAPTLEELRQMEYLYAVIKESLRLCSIFDVLILRDTVEDMYLDDTFIPKGTRITVDVSAIQRDSKVWSKPDDFIPERFMEGGEAEGHEGMTWLPFGGGARQCIGMNFSLTEQKVALAMLVQRYDIDVPKDSIHYENIVYERPFYLAPQSLELKFTKLH

SEQ ID NO: 199 - DNA, 1572 bp, Rhizopus microsporus
  source 1..1572: mol_type = other DNA
atgaactccctgatcaacatctacaccacatcttttaagaggctgttgccattgatcaaggatagatctaagaccttgtgtattaccgctgccattttgttggttgccttgcaacaaattaggtcctttttctacgtccccaaatccatcagatctattccaaaggtttcctacttgtccatggccatttcattcttgtatagagaaggtccaccagaaagattgaagaggttgaaattgccagctatgagaaaaggtaacggcttctacttgtctagaattccatttggttggaccgtttacgttgctaatccaattgctgctaaacagttgttgttgaaggctgaaaatttccccaagtctcacttcttgatggaaactgttggtaaggattctccattcgttcaatttttgggtccagataacgttgtcaactctaatggtgaaaactggaaaaagcagcgtaaggttatgaatccagctttccatagatcaatgccagttaagactattgccggtgttattccaactttgttcgccgttattgataagtacgaaggtaaggttccagtcacctctattatgcaagaattcaccttggatgttttgggtttagccatcttcgattttgacttcggttctttgaaaggtgatgctgaaaaatggcgtgctgagtacaaattggttatggaaactttgtttgacccagtcactaacgttttcactggtttggatttcttgttgagatacgtctaccctaagagaattagaggtgctaaggctgttaacaacctgaacaagttgtttgacaagttggtcaaagaaaagaggttggaagttcaaaacggtgttcatgttaacaagccacaagacgaaaaggatttgttgaccttgatgttggaagctgaacaaaaaggtgaagctatgactaccgatatggaaatgagacataacgttgccgtttttttcttggctggtcatgaatctactgcccatgttttgtctttcaccttgtactttttggccaagaacaagcacgttcaacagaagttgagagaagaggttaatagagtcatgggtagagaatctgttgatgctgctccaactttagaagaattgagacagatggaatacttgtacgccgtcatcaaagaatccttgagattgtgctctatcttcgacgttttgatcttgagagataccgtggaagatatgtacttggatgataccttcattcccaagggtactagaattaccgttgatgtttctgccatccaaagagattcaaaggtttggtctaagccagatgatttcattccagaaaggtttatggaaggtggtgaagctgaaggtcacgaaggtatgacttggttgccatttggtggtggtgctagacaatgtattggtatgaatttctccctgaccgaacaaaaggttgctttggctatgttggttcaaagatacgatatcgatgttcccaaggactctatccattacgaaaacatcgtttacgaaaggccattttacttggctccacaatctttggaattgaagttcaccaagttgcactaa

SEQ ID NO: 200 - protein, 522 aa, Rhizopus microsporus
MDRLVKAYNNSIKELVPVLQKRSKASYITAAIALIIAQRLYSYFRVPKHLRGFPKLPYFGIAKSFFAKESPRERVKKYVLPIIDEHNGFYISKIPFGWTLYTTNPVAAKQILLKSNGFPKNHGQIDDMGENLFIEFVGKDNVGLTNGDTWKRQRKVMNPAFHHSLPIKTMSKVVLSLISVIGQANGTVPVVSTMQNFTLDTLGLAIFGFNFKALQGDGDEWTKTYRLVSDCLFDPVLNVFSSYSFIFDRIYPKRRRGVIATRKLGEKFLEIAQQKRMEIKSGAFADVPDNEKDLLTLMLEAEEKGDVWTSEDELRHNIAILFLAGHDTTAHALSFCFYHLAKNKDIQQKLRKEVLDLLGDEPVDVVPTVEQLKDMQYLNMVIKENLRMNSPADTLFSRDVQEDIILANTLIPKGTVISINMEALHCNPKFWHNPDQFDPERFAPGGEHEQHEGMTWLPFSNGTRQCLGMNFSLFEQRLVIAMILKKYEISIPEDSIHRNHIINDMPFNVAPKSLELTFTKRY

SEQ ID NO: 201 - DNA, 1569 bp, Rhizopus microsporus
  source 1..1569: mol_type = other DNA
atggacagattggttaaggcctacaacaactccatcaaagaattggttccagtcttgcagaaaagatccaaggcttcttatattaccgctgccattgctttgattattgcccaaagactgtactcctacttcagagttccaaaacatttgagaggtttcccaaagttgccatactttggtattgctaagtcattcttcgccaaagaatctccaagagaaagagttaagaagtacgtcttgccaatcatcgacgaacataacggtttctacattagcaagattccatttggttggaccttgtacactactaatccagttgctgctaagcagatcttgttgaagtctaatggttttccaaagaaccacggtcaaatcgatgatatgggtgaaaacttgttcatcgaattcgttggtaaggataacgttggtttgactaatggtgatacctggaagagacaaagaaaggttatgaatccagccttccatcattccttgcctattaagactatgtccaaggttgtcctgtccttgatttctgttattggtcaagctaatggtactgtcccagttgtttctactatgcaaaacttcaccttggataccttgggtttagctattttcggttttaacttcaaggcattgcaaggtgatggtgatgaatggactaagacctatagattggtttccgattgcttgttcgatccagttttgaacgttttctcctcctactcattcatcttcgatagaatctaccccaagagaagaagaggtgttattgctactagaaagttgggtgagaagttcttggaaattgcccaacaaaagaggatggaaatcaagtctggtgcttttgctgatgttccagataacgaaaaggatctgttgaccttgatgttggaagctgaagaaaaaggtgatgtctggacttctgaagatgagttgagacataacattgccattttgttcttggctggtcatgatacaactgctcatgctttgtctttctgcttttaccatttggctaagaacaaggacatccagcagaagttgagaaaagaagttttggatttgttgggtgatgaaccagttgatgttgttccaactgttgaacaattgaaggacatgcagtacttgaacatggtgatcaaagaaaacctgaggatgaattctccagctgatactttgttttccagggatgttcaagaggatattatcttggctaacaccttgattccaaagggtactgttatctccattaacatggaagccttgcattgcaatccaaagttttggcataatccagatcaattcgacccagaaagatttgctccaggtggtgaacatgaacaacatgaaggtatgacttggttgccattctcaaatggtactagacaatgtctgggtatgaacttcagcttgtttgaacaaagattggtgatcgccatgatcctgaaaaagtacgaaatttccattccagaggactccatccatagaaaccatattatcaacgacatgccattcaacgttgctccaaaatcattggaattgaccttcaccaagaggtactga

SEQ ID NO: 202 - protein, 533 aa, Lichtheimia corymbifera JMRC:FSU:9682
MDQITSTVNTYVVPLFAGEQGKRLIQHHRTSIAAAVALVSTYAIFRSITQVPRQLKHLPHLGFFDYIKAVVAGKTTDDIAHELTIPIAMQSKSGLYARFDRDGWSVHIVDPGAAKKFLFKIDIFPKTEHAIQDGQLIGRVMGTRHIAILNGHEWKTHRKVANPAFHRAMPINIFGQITHRLFKVMDDQLQNGPIEVHSQMTRWTLDALGLFAFDFDFNAVQDQDNEWVSRYNTVMTSAFDVPYLVFPSLDTWLLPFNPSRKQKHAEADKLLGMIDQIILEKRKTLQNKSSTATEKQDEEKDLLTMMIEAENSGEGVLTNQELRNNVVVFLIAGHDTTANALATLLYELAVNQDVQTRARKEAIRTLGEAQENIVPTAEQTRDMTYINMVIKENLRIHPPAPGTATRITQEDTELAGEFIPKGTPVVLDIHEMHHNPNIWSNPEEFKPERFTSGGEAEQLARRGIAWLTFSNGARQCLGMNFSLTEQRVLLPMLLRKYEWHLPENSIHKDKMVTGGLSLVTSPKDLQIVFKRRY

SEQ ID NO: 203 - DNA, 1602 bp, Lichtheimia corymbifera JMRC:FSU:9682
  source 1..1602: mol_type = other DNA
atggaccaaatcacctctaccgttaacacttacgttgttccattattcgctggtgaacaaggtaagagattgatccaacatcatagaacctctattgctgctgctgttgctttggtttctacttacgctattttcagatccatcactcaagtcccaagacaattgaaacatttgccacatttgggtttcttcgattacattaaggctgttgttgctggtaagaccactgatgatattgctcatgaattgaccattccaatcgccatgcaatctaaatctggtctgtatgctagattcgatagagatggttggtctgttcatatagttgatccaggtgctgctaagaagttcttgttcaagattgatatcttcccaaagaccgaacatgccattcaagacggtcaattgattggtagagttatgggtactagacatatcgccattttgaatggtcatgaatggaaaacccataggaaggttgctaatccagcttttcatagagctatgccaatcaacattttcggtcaaattacccacaggttgttcaaggttatggatgaccaattgcaaaacggtccaatcgaagttcattctcaaatgactagatggaccttggatgctttgggtttgtttgcttttgatttcgatttcaacgccgttcaagatcaagataacgaatgggtttctaggtacaacactgttatgacatctgctttcgatgttccctacttggtttttccatctttggatacttggctgttgccttttaatccatccagaaagcaaaaacatgctgaagccgataagttgttgggtatgattgaccagattatcttggagaagagaaagaccttgcagaacaaatcttctactgctaccgaaaagcaagacgaagaaaaggatttgttgaccatgatgattgaagccgaaaattctggtgaaggtgtcttgactaatcaagagttgagaaacaatgtcgtggttttcttgattgctggtcatgatacaactgctaatgctttggctactttgttgtacgaattggccgttaatcaagatgttcaaaccagagctagaaaagaagccattagaactttgggtgaagcccaagaaaacatagttccaactgctgaacaaactagagacatgacctacatcaacatggtgatcaaagaaaacttgaggattcatccaccagctccaggtacagctactagaattactcaagaagatactgaattggctggtgagtttattccaaaaggtactccagttgttttggacatccacgaaatgcatcataacccaaacatttggtctaacccagaagaattcaagccagaaagattcacttctggtggtgaagctgaacaattggctagaagaggtattgcttggttgactttttctaacggtgctagacaatgcttgggcatgaatttttcattgaccgaacaaagggttctgctgccaatgttgttgagaaagtacgaatggcatttgccagaaaactccatccataaggataagatggttactggtggtttgtctttggttacttctccaaaagacctgcaaatcgtgtttaagagaaggtactga

SEQ ID NO: 204 - protein, 533 aa, Lichtheimia ramosa
MDHITNTINTFVAPLLTSEQGKRLVQQHRTSITAAVALISSSYAIFRYITKVPRQLKHFPHLGYFDYLKAVVTGKSMDDIALELTIPIAMRSKSGMYVRYDRNGWSVHIVGIKAAKKFLFKTDMFPKAQGVLQKDQLLCRVMGDRHIDILNGQEWKTHRKVANPAFHRSMPINIFGQVTHKLFKVMDDELQHGSIEVHDLMARWTLDALGLAAFGFDFNAIQDKNNEWVLRYNTVMSSAFDVSYLMFPSLDSWLLPFNSMRKHKHDEANKFLDMIDQIILEKRNALQNKSSTPEEQEQEKDLLTMMIEAGRSGQGGLTNEELRNDVVVFFIAGHDTTANALSTVLYELAKNQDVQAKARQEAIKVLGEASENVVPTAEQMNQMKYINMVIKENLRIHPPAPGTGARTAQEDTEISGEVIPKGTRVVIDIHEMHHSPNIWYKPEEFRPERFTPGGEADQLAGRGMSWLPFSNGTRQCIGMNFSLTEQRVLLPMLLRKYEWHLPEDSIHKERLFTGGLALVTSPKDLRIVFKRRY

SEQ ID NO: 205 - DNA, 1602 bp, Lichtheimia ramosa
  source 1..1602: mol_type = other DNA
atggaccatatcaccaacaccatcaacacttttgttgctccattattgacctccgaacaaggtaaaagattggtccaacaacatagaacctctattactgctgctgttgccttgatttcttcctcttacgctattttcaggtacatcactaaggtcccaagacaattgaaacatttcccacatttgggttacttcgattacttgaaggctgttgttactggtaagtccatggatgatattgctttggaattgaccattccaatcgccatgagatctaaatctggtatgtacgttagatacgacagaaacggttggtctgttcatatcgttggtattaaggctgctaagaagttcttgttcaagaccgatatgtttccaaaagctcaaggtgtcttgcaaaaggatcaactgttgtgtagagttatgggtgatagacacatcgatatcttgaacggtcaagaatggaaaacccatagaaaggttgctaatccagctttccatagatccatgccaatcaacattttcggtcaagttacccacaagttgttcaaggttatggatgatgaattgcagcacggttccattgaagttcatgatttgatggctagatggaccttggatgctttgggtttagctgcttttggttttgatttcaacgccatccaagacaagaacaacgaatgggttttgagatacaacaccgttatgtcctctgctttcgatgtttcttacttgatgttcccatctttggactcttggttgttgccattcaactctatgagaaaacacaagcacgatgaagccaacaagttcttggatatgattgaccagatcatcttggaaaagagaaacgccttgcaaaacaaatcttctaccccagaagaacaagagcaagaaaaggatttgttgaccatgatgattgaagctggtagatcaggtcaaggtggtttgactaatgaagaattgagaaacgatgtcgtcgtgttctttattgctggtcatgatacaactgctaacgctttgtctactgtcttgtacgaattggccaagaatcaagatgttcaagctaaggctagacaagaagccattaaggttttgggtgaagcttctgaaaacgttgttccaactgctgaacaaatgaaccagatgaagtacatcaacatggtgatcaaagagaacttgagaattcatccaccagctccaggtactggtgctagaactgctcaagaagatactgaaatttccggtgaagttatcccaaagggtactagagttgttatcgatatccacgaaatgcatcactctccaaacatttggtacaagccagaagaattcagaccagaaagattcactccaggtggtgaagctgatcaattggctggtagaggtatgtcttggttgccattttctaatggtactagacaatgcatcggtatgaacttctcattgactgaacaaagggttctgttgccaatgttgttgagaaagtatgaatggcacttgccagaagattccattcacaaagaaagattattcaccggtggtttggctttggttacttctccaaaagatttgaggatcgtgttcaagagaaggtactga

SEQ ID NO: 206 - protein, 523 aa, Rhizopus microsporus
MDVINHNYKILLERIAPFLQKRVKKSYIGVAVLLICAQQVYSFFRVPKKLRHIPAVSAYAMMKSALRGQSRVDCERELLLPVSHKGNGIYLNKIPVTWVVYVANPVAAKQLLMKTDIFPKSHKTIKVAGKTGFIANFIGYDNIVMSNGHAWKKQRSLMNPVFHRSMPIKTMGEGVKALFSIIDRENGTINVSSKMQEFTLDVLGITTFGFDFKSMEGDPEKWGEVYHLVNKQLNDPIEFIFSKHVPLLHRILPEKRRAHAALAKLNAKFDEIVRQRRAELESGALDNVPENEKDLITLMLEAEKRGEAIVTEEQLRHNIAVIFVAGHETTANTLAFCLYNLAKYKHVQAKLRKEVIEVLGNDPVDFIPTLEELRRMEYLNMVIKENLRLYGPVDTVLPREAAEDATLAGTFIPKGTLLNLDIGSIHRDPHVWKNPEEFIPERFGPNGEQGDHTGFTWIPFSSGSRQCIGMNFSLAEQRIFLAMTLKKYEIEIPKDSIHSDHIVFDQINTRSPKNLELTFKRRY

SEQ ID NO: 207 - DNA, 1572 bp, Rhizopus microsporus
  source 1..1572: mol_type = other DNA
atggacgtcatcaaccacaactacaagattttgttggaaagaatcgccccattcttgcaaaagagagtcaaaaagtcttacatcggtgttgccgttttgttgatttgtgctcaacaagtctacagctttttcagagttccaaagaagttgagacatatcccagctgtttctgcttatgctatgatgaagtctgctttgagaggtcaatctagagttgattgtgaacgtgaattgctgttgccagtttctcacaaaggtaatggtatctacttgaacaagattccagttacctgggttgtttacgttgctaatccagttgctgctaaacagttgttgatgaagactgatatcttccccaagtctcataagaccattaaggttgctggtaagactggtttcattgccaatttcattggttacgacaacatcgtcatgtctaatggtcatgcttggaaaaagcagaggtctttgatgaatccagttttccatagatccatgccaatcaagactatgggtgaaggtgttaaggctttgttctccattatcgatagagaaaacggcaccatcaacgtgtcatctaaaatgcaagaattcaccttggatgtcttgggtattactactttcggtttcgacttcaagtctatggaaggtgatccagaaaaatggggtgaagtttaccatttggtcaacaagcaattgaacgacccaatcgaattcatcttctccaaacatgttcctttgttgcacagaatcttgccagaaaaaagacgtgctcatgctgctttggctaaattgaatgctaagttcgacgaaatcgtcagacaaagaagggctgaattggaatctggtgctttggataatgttccagaaaacgaaaaggacctgatcaccttgatgttggaagctgaaaaaagaggtgaagctatcgttaccgaagaacaattgagacacaacattgccgttatttttgttgctggtcacgaaactactgctaacactttggctttttgcttgtacaacctggccaagtacaaacacgttcaagctaagttgagaaaagaagtcatcgaggttttgggtaacgatccagttgatttcattccaaccttggaagaattgaggcgtatggaatacttgaatatggtgatcaaagaaaacctgaggttgtacggtcctgttgatactgttttgccaagagaagctgctgaagatgctactttagctggtacttttattccaaagggcaccttgttgaacttggatattggttccattcatagagatccacacgtttggaaaaacccagaagaattcattccagaaagattcggtccaaatggtgaacaaggtgaccatactggttttacttggattccattttccagcggttctagacaatgtatcggtatgaatttctcattggccgaacagagaattttcttggctatgactttgaagaagtacgagatcgaaatcccaaaggattccatccattctgatcacatcgttttcgatcagatcaacactagatctccaaagaacttggagttgacctttaagagaaggtactaa

SEQ ID NO: 208 - protein, 532 aa, Lichtheimia ramosa
MDQITNTINTYVAPFFTSGQGTRLVQQHRTSITAAVALISSYAIFRSITKVPRQLEHLPHLGFFDYMKAIVTGKSMDDIAHELTIPAAMQSRGGLYVRYDKDGWSVHIVGPEAAKKFLFKTDIFPKAQDTMHESQLLARVTGLRNIASLEGQEWKAHRKVANPAFHRSMPINTFGRVTHKLFKVMDDQLQNGSIEVHDIMTRWTLDSLGLAAFDFDFNSIQDKDNEWVSRYNTVMSSALDVPYLMFPSLDSWLLPFNPPRKHKHAEADKFLGMIDQIILEKRKTLQNKSLTAEEQDREKDLLTMMIEAENSGEGVMTNQELRDNVVIFFIAGHDTTANALSTVIYELAVNQDLQAKARKEANRILGEVLENVIPTAEQIREMPYINMIIKENLRLHPPAPGVAARVTKADTELAGELIPKGTRVLLDIHELHHHPKIWNNPEVFQPERFVPGGEADQLAGNGMPWLPFSNGSRQCLGMNFSLTEQRVLLPMLLRKYEWHLPENSIHKDKLYTGKFSLVTSPKDLQIVFKRRY

SEQ ID NO: 209 - DNA, 1599 bp, Lichtheimia ramosa
  source 1..1599: mol_type = other DNA
atggaccaaatcaccaacaccatcaacacttatgttgctccatttttcacatccggtcaaggtactagattggttcaacaacatagaacctctattactgctgctgttgccttgatttcttcctacgctattttcagatccatcaccaaagttccaagacagttggaacatttgccacatttgggtttcttcgattacatgaaggctatcgttactggtaagtccatggatgatattgctcacgaattgactattccagctgctatgcaatctagaggtggtctgtatgttagatacgataaggatggttggtccgttcatatagttggtccagaagctgctaagaagttcttgttcaagactgatattttcccaaaggctcaagataccatgcatgaatctcaattattggctagagttaccggcttgagaaacattgcttctttggaaggtcaagaatggaaggctcatagaaaagttgctaatccagctttccataggtctatgccaatcaatactttcggtagagttacgcacaagttgttcaaggttatggatgaccaattgcagaacggttccattgaagttcatgacattatgactagatggaccttggactctttgggtttagctgcttttgatttcgacttcaactccatccaagataaggataacgaatgggtgtctagatacaacaccgttatgtcatctgctttggatgttccatacttgatgttcccatctttggattcttggttgttgccttttaacccaccaagaaaacacaaacatgctgaagctgataagttcttgggtatgatcgaccagatcatcttggaaaaaagaaagaccttgcagaacaagtctttgaccgctgaagaacaagatagagaaaaggatttgctgaccatgatgattgaagctgaaaattctggtgaaggcgtcatgactaatcaagaattgagagataacgtcgtcatcttcttcattgctggtcatgatacaactgctaacgctttgtctactgtcatctatgaattggccgttaatcaagacttgcaagctaaggctagaaaagaagccaatagaatcttgggtgaagtgttggaaaatgttattccaaccgccgaacaaatcagagaaatgccttatatcaacatgatcatcaaagagaacttgaggttgcatccaccagctccaggtgttgctgcaagagttacaaaagctgatactgaattggctggtgaattgattccaaagggtactagagttttgttggacatccatgaattgcatcatcacccaaagatttggaacaacccagaagtttttcagccagaaagatttgttccaggtggtgaagcagatcaattagctggtaatggtatgccatggttgccattttctaatggttctagacaatgtctgggtatgaacttctcattgactgaacaaagggttctgttgccaatgctgttgagaaagtacgaatggcatttgccagaaaactccattcacaaggataagttgtacaccggtaagttttctttggttacttctccaaaggacctgcagatcgttttcaaaagaagatactga

SEQ ID NO: 210 - protein, 532 aa, Lichtheimia ramosa
MNQLTSTINTFVAPFFTGEQGTRLVQRNRASITAAIALISSYAIFKSVTKVPRQLEHIPHLGFFDYLKAVLMGKSIDDIAHELTIPMAMQSKNGMYVRYDKDGWSVHIVNPQAAKRFLLKMDVFPRAQDALIEGQLLRRIVGVRHMAVLDGQEWRQQRKVANPAFHRSMPINIFGQVTHKLFKVMDDESQYGSIEVHDLMTRWTLDSLGLAAFGFDFNAVQDKDNEWVSRYNTIISSALNMPYLVFQSLDTWFLPFNSSRKHQHAEADKFLGMIDQIILEKRKTLQNKSLITDEQEQEKDLLTMMIEAENSGEGVMTNEELRDNVVVFFIAGHDTTANALSTMLYELAVNQDVQAKAREEATQVLGEAYENVVPTAEQAHEMTYINMIIKENLRIHPPVSIAGARTTQRDTELIGEFIPRGTRVLLDIYEMHHHPNIWDNPEVFQPERFIPGGEADQLAGNGMAWLPFINGSHQCIGMNFSLTEQRVLLSMLLRKYEWYLPEDSIHKEKLFTGSVSVLTSPKDLQIVFKRRY

SEQ ID NO: 211 - DNA, 1599 bp, Lichtheimia ramosa
  source 1..1599: mol_type = other DNA
atgaaccagttgacctccaccattaacacttttgttgctccatttttcactggtgaacagggtactagattggtccaaagaaatagagcttctattaccgctgctattgccttgatttcttcctacgctattttcaagtctgtcaccaaagttccaagacagttggaacatattccacacttgggtttcttcgattacttgaaggctgttttgatgggcaagtccattgatgatattgctcacgaattgaccattccaatggctatgcaatctaagaacggtatgtatgtcagatacgataaggatggttggtccgttcatatcgttaatccacaagctgctaagaggttcttgttgaagatggatgtttttccaagagcacaagatgctttgattgaaggtcaactattgagaagaatcgttggtgttagacatatggcagttttggatggtcaagaatggcgtcaacaaagaaaagttgctaatccagctttccacagatctatgccaatcaacattttcggtcaagttacccacaagttgttcaaggttatggatgacgaatctcagtacggttccattgaagttcatgatttgatgactagatggaccttggactctttgggtttagctgcttttggttttgatttcaacgccgttcaagataaggataacgaatgggtttctaggtacaacaccattatttcttccgctttgaacatgccctacttggtttttcaatctttggatacctggttcctgccattcaactcttctagaaaacatcaacatgctgaagccgataagttcttgggtatgattgaccaaattatcttggagaagagaaagaccttgcagaacaagtctttgatcaccgatgaacaagaacaagagaaggatttgttgaccatgatgattgaagctgaaaactctggtgaaggtgttatgactaacgaagaattgagagataacgtcgtcgttttcttcattgctggtcatgatacaactgctaacgctttgtctactatgttgtacgaattggccgttaaccaggatgttcaagctaaagctagagaagaagctactcaagttttgggtgaagcttacgaaaacgttgttccaacagctgaacaagcacacgaaatgacttacattaacatgatcatcaaagagaacctgaggatccatccaccagtttctattgctggtgctagaactactcaaagagataccgaattgatcggtgaattcattccaagaggtactagagttttgttggacatctacgaaatgcatcatcatccaaacatttgggataacccagaagtttttcagccagaaagattcattcctggtggtgaagctgatcaattggctggtaatggtatggcttggttgccattcattaacggttctcatcaatgtatcggtatgaacttctcattgaccgaacaaagggttctgttgtctatgttgttgagaaagtacgaatggtacttgccagaagattccatacacaaagagaagttattcaccggttccgtttctgttttgacttctccaaaagacctgcaaatcgtgtttaagagaaggtactga

SEQ ID NO: 212 - protein, 530 aa, Syncephalastrum racemosum
MDSIIDHVNTYVVPFFTSEQSQRLFHRHRVSISAAVTLITTYALYTSITTVPHKLAHIPHLGFFEYIKAMMDRRSINEVSKELTIPAGNKSDSGLYDNDTLWLRVYQALNFSQDIFPKADRSHTFGTLFGRMLGTRHIGSLTGAPWKAHRKIANPAFHGTMPVNMFGQLSIKLFGVMDELCKEGPIDIHDATERWTLDALGLTAFDFDFNAVGDKNSEWVTRYKTVMSATFEPLYLMLPKLDTWFLPLNVKRKQKHAECDSLLNMIDNIIATKRQMLKNKKQSSDTDEHEEKDLLTMMIEAENSGQGIMSNEELRNNMVIFFIAGHDTTANALAGIAYELAVNPDVQAKAREEAIRVLGDAPEDVIPTAEQWSQMPYIHQAIKENLRVHPPAASTLARTTSQDTELAGTFVPKGSKVVLDIYELHHNPKVWSEPDTFKPERFAPGGEAEQLAGQGMPWLPFIAIIHRNGQRQCLGMNFSLAEQRTLLPMLLRKYELSLPENSAHKNGLSTTGLVLGVRPDDLQIVFKPRY

SEQ ID NO: 213 - DNA, 1602 bp, Syncephalastrum racemosum
  source 1..1602: mol_type = other DNA
atggaccccatcattaacatctacgagaagtatgttttgcccttgactttacaagctgataaggctttgagaaagcacaagaaggtttccatttctttggctgttgctttgactaccgttttcatcgttacccaaagaattttgaaaccaccaaaggccttgagacaagttccatatgttggtgctgttggttatttgagagctagaatttctggtactccattgtctgaaatcgtcagaaagtacactttgccagctgctttgaaaactgatcatggtctgtacactagattcgatcaaaatggttgggccttgcatattactactccagatttggctaagaggttcttgatgaagactgatgtttttgctaaggccgacttgaagtctcaattggaaggtactatggttggcagatttttctacggtaggaacattttgttcaccaacggtactgaatggaagaagcacagaaaaattgctaacccagctttccatagagctatgccagttgaattatttggtcagttgacccacaagttgttcaaggctatggattctccagatgttgattacgatgctgttaacttccatgacttgatgactagatggaccttgtctgctattggtattgctggttttggtttcgatttccaagctttggaagataagaacaacgaatgggttagagtctacaactctattgataccgcttccagagatttcaagtacgctgtttttccattcttcgacagaaacttgttgtggttgaatagaactagaagggctaagcacgaagatttgactagattcttgaacttgatcgacggtatcatcgaaaacaagagaaaggccattcaagagcaagaattctctaccgtcaaagaatccgaaagagatttgttgaccttgatggtcgaatctgaaaaagctggtgaaggtactttgaccgatgaagaattgaagtctaacctgtgcgtttttttcttggctggtcatgatacaactgctaacgctttgacttttgccatctattacttggctgttaacccagacattcaagaaaaggctagagaagaagctattaaggctttcggtgataaccatggtgatattttgccaactgccgaagaaacaaaagagttgcagtacattaactgcatcatcaaagaaaccttgagaattgctccaccagctactggtgttatttctagaggtttgactactgactccgaaatctcaggtatggtttttccaaaaggtactagagtcatgctggatatctacgaattgcatcataacccaagaatctggtctaacccagaaaagtttgatccagacagatttttgccaggtggtgaagctgaacaattggcttctaatggttcttctatggcttgggttccattttcaaatggtgctagacaatgtattggtgccaatttctcattggccgaacaaagagttttactgcctttgttgttgagaaagttcgaatggtctttgccagaaggttctccacataaggatagaccaattactggtaacatgggtgttttgtctgctgttgatttgaggatctctttcaagaagaggtactaa

SEQ ID NO: 214 - protein, 537 aa, Cunninghamella echinulata
MGSLFQKYQENFNSLLAVNNSSISSTVNGLKNHKTPIIIAISLFLLNSIYQKYFTPPKHLKHIPHVGFFKFIKKIFQGAPHSTISKELAAPLYKQKKSGEMYLMMDSMGWTVNIVNPEDAKQVFLKSDLFSKAEAPFTKDTLTHNYIRNDNLALVSDKNEWKKHRMTVNPAFHRHMPVKLFTEYVHRVFDVIDSSNESTVDVNMLMQKFTLDIIGKAGFGFDFNSLNEKNNEWVETYHTIKDATENPIFFFFPFLETKLLWLFPRRRYEHAMVKKFYGMLEDVIENKRQYLKTQKEVSSINDAEKDLLTLMLESESSNQNSLTNTELKSNLNLFFSAGHDTTSNSLSAAMYYLAKHQDIQQRAREEAISILGDEPVNVFPTFEQTKELVFINQVIKETLRLSGPATKISTRITKEDTVLSGTFIPKNTPIVVNMLGLHSNENVWKDPYIFNPERFSPNGEAEQKIREGLSWAPFASGPRQCIGMNFSLAEQRVMLLSILRKYEFHLPENTIHKDGLITNNIGVLRPIDLKIIFKPRY

SEQ ID NO: 215 - DNA, 1614 bp, Cunninghamella echinulata
  source 1..1614: mol_type = other DNA
atgggctccttgttccagaagtaccaagaaaatttcaactccttgttggccgtcaacaactcctctatttcttctactgttaacggcttgaagaaccataagaccccaattatcattgccatcagcttgttcttgctgaactctatctatcaaaagtacttcactccaccaaagcacttgaaacatattccacatgttggtttcttcaagttcatcaaaaagatcttccaaggtgctccacattccaccatttctaaagaattggctgctccactgtacaagcaaaaaaagtctggtgaaatgtacctgatgatggattctatgggttggactgttaatatcgtcaatccagaagatgccaagcaggtttttttgaagtctgacttgttttccaaagctgaagctccattcactaaggatactttgacccataactacatccgtaacgataacttggctttggtttccgataagaacgaatggaaaaagcacagaatgactgttaacccagctttccatagacatatgccagttaagttgttcaccgaatacgttcacagagttttcgatgttatcgactcctctaacgaatctaccgttgatgtcaatatgctgatgcaaaagttcaccttggatattattggtaaggctggtttcggtttcgacttcaattctttgaacgaaaagaacaacgaatgggtcgaaacttaccataccattaaggatgctactgagaacccaattttcttcttcttcccattcctggaaactaagttgttgtggttgtttccaagacgtagatacgaacatgctatggtcaaaaagttctacggtatgttggaagatgtcatcgagaacaagagacagtacttgaaaacccagaaagaggtgtcctctattaacgatgctgaaaaggatttgctgaccttgatgttggaatccgaatcctctaatcaaaactctttgaccaacaccgagctgaagtctaatttgaacttgtttttctctgccggtcatgacactacctctaattctttgtctgctgctatgtactacttggctaagcaccaagatattcaacaaagagctagagaagaagccatctccattttgggtgatgaaccagttaatgttttcccaacctttgaacagaccaaagagctggttttcattaaccaggttatcaaagaaaccttgaggttgtctggtccagctactaagatttctaccagaatcaccaaagaagataccgtcttgtctggtactttcattccaaagaataccccaatcgtcgttaatatgttgggcttgcattctaacgaaaacgtttggaaggatccctacattttcaaccctgaaagattttctccaaacggtgaagccgaacaaaagattagagaaggtttgtcttgggctccatttgcttcaggtccaagacaatgtattggtatgaatttctcattggccgaacagagagttatgctgttgtctattttgaggaagtacgaattccacttgccagaaaacactatccataaggatggtttgatcaccaacaacattggtgttttgaggccaatcgatctgaagatcatttttaagccaaggtactaa

SEQ ID NO: 216 - protein, 532 aa, Rhizopus azygosporus
MLTVVVKDKLHRLIRVILPFLKSRAGVLSISSAAILAVLYSLVQKFNRPPSQLRHLPYVDRFTFLKYGFKDIPYDQYGKEKLLPLLKAGTNGIYLRCTVEGWSVRLANPIAIKQFTLKQEYTFPKATNNGGVEGSLIKKFLGGPNIVFLSGADWKRHRKIANLAFQRSMPIKLFGKLTKKMFESMEDLGYDNVDVNDLFQRFTLDAIGIGGFGFDFNALGDKDSQWVRNYESIMQGMASPFFIAFPAFDTTYRHWFKKRLEVHNNLDMFLDNIDKMIEQKRKNVYDNVETNSSDEEKDLLTLMIESETKGAGERMSDEELRSNLCIFFLAGHDTTANTLAAILYELAKHPEIQERARQEAIRILGDSSEDIVPTFDQLKELSYINMIIKETLRRHPPAYATTDRVTQEDLMLGGMHIPKGSGLAIDIYLLHHNPDVWADPFEFKPERFAPGGEAEHQKGIAWAPFSNGGRQCVGMNFSLTEQRVLIPMLLKKFTWTLPKDSPHKEELLKRGIAWGLVTFSDKVKINFKKRHS

SEQ ID NO: 217 - DNA, 1599 bp, Rhizopus azygosporus
  source 1..1599: mol_type = other DNA
atgttgaccgttgttgtcaaggacaagttgcatagattgatcagagttatcctgccattcttgaaatctagagctggtgttttgtccatttcctctgctgctattttggctgtcttgtactctttggttcagaagtttaatagaccaccatctcagttgagacacttgccatatgttgatagattcaccttcttgaagtacggcttcaaggatattccatacgaccaatacggtaaagaaaagttgttgcctttgttgaaggctggtactaatggtatctacttgagatgtactgttgaaggttggagtgttagattggctaatccaattgccattaagcagttcactttgaagcaagagtacacttttccaaaggctacaaacaatggtggtgtagaaggttccttgatcaaaaagtttttaggtggtcccaacatcgtgtttttgtctggtgctgattggaagagacatagaaagattgctaacttggccttccaaagatctatgccaatcaagttgtttggcaagctgaccaaaaagatgttcgagtctatggaagatttgggttacgataacgttgatgtcaacgatttgttccaaaggtttaccttggatgccattggtattggtggttttggttttgattttaacgccttgggtgataaggattcccaatgggttagaaactacgagtctattatgcaaggtatggcttccccatttttcattgcttttccagcttttgataccacctacagacattggtttaagaagagattggaagtccacaacaacctggatatgttcttggataacatcgacaagatgatcgagcaaaagagaaagaacgtttacgacaacgtcgagactaactcttctgatgaagaaaaggatctgctgaccttgatgatcgaatctgaaacaaaaggtgctggtgaaagaatgtccgatgaagaattgagatctaacttgtgtatcttcttcttggctggtcatgataccactgctaatactttggctgctatcttgtacgaattggccaaacatccagaaattcaagaaagagctagacaagaagccatcagaattttgggtgattcctctgaagatattgtcccaactttcgaccagttgaaagagttgtcttacatcaacatgatcatcaaagaaaccttgagaaggcatccaccagcttatgctactactgatagagttactcaagaggacttgatgttaggtggaatgcatattccaaaaggttccggtttggctattgacatctatttgttgcatcacaacccagatgtttgggctgatccattcgaattcaaaccagaaagatttgctccaggtggtgaagctgaacatcaaaaaggtattgcttgggctccattttctaatggtggtagacaatgtgttggcatgaacttctcattgactgaacaacgtgttctgatcccaatgttgttgaagaagtttacttggactttgccaaaggactctccacacaaagaagaattattgaagagaggtatagcctggggtttagttactttttccgataaggttaagatcaacttcaaaaagaggcactcctaa

SEQ ID NO: 218 - protein, 532 aa, Rhizopus azygosporus
MLTVVVKDKVHRLIRVILPFLKSRAGVLSISSAAILAVLYSLVQKFNRPPSQLRHLPYVDRFTFLKYGFKDIPYDQYGKEKLLPLLKAGTNGIYLRCTVEGWSVRLANPIAIKQFTLKQEYTFPKATDNGGVEGSLIKKFLGGPNIVFLSGADWKRHRKIANLAFQRSMPIKLFGRLTKKMFESMEDLGYDNVDVNDLFQRFTLDAIGIGGFGFDFNALGDKDSQWVKNYESIMQGMASPFFIAFPAFDTTYRHWFKKRLEVHNSLDMFLDNIDKMIEQKRRNVYENAETSSSDEEKDLLTLMIESETKGAGERMSDEELRSNLCIFFLAGHDTTANTLAAILYELAKHPEIQERARQEAIRILGDGPEDIVPTFDQLKELSYINMIIKETLRRHPPAYATTDRVTQEDLMLGGMHIPKGSGLAIDIYLLHHNPDVWADPFEFKPERFAPGGEAEHQKGIAWAPFSNGGRQCVGMNFSLTEQRVLIPMLLKKFTWTLPNDSPHKEELLKRGIAWGLVTFSDKVKINFKKRHS

SEQ ID NO: 219 - DNA, 1599 bp, Rhizopus azygosporus
  source 1..1599: mol_type = other DNA
atgttgaccgttgttgtcaaggataaggtccatagattgatcagagttatcctgccattcttgaaatctagagctggtgttttgtccatttcctctgctgctattttggctgtcttgtactctttggttcagaagtttaatagaccaccatctcagttgagacacttgccatatgttgatagattcaccttcttgaagtacggcttcaaggatattccatacgaccaatacggtaaagaaaagttgttgcctttgttgaaggctggtactaatggtatctacttgagatgtactgttgaaggttggagtgttagattggctaatccaattgccattaagcagttcactttgaagcaagagtacacttttccaaaggctactgataatggtggtgtagaaggttccttgatcaaaaagtttttaggtggtcccaacatcgtgtttttgtctggtgctgattggaagagacatagaaagattgctaacttggccttccaaagatctatgccaatcaagttgtttggcagactgaccaaaaagatgttcgagtctatggaagatttgggttacgataacgttgatgtcaacgatttgttccaaaggtttaccttggatgccattggtattggtggttttggttttgattttaacgccttgggtgataaggattcccaatgggttaagaactacgagtctattatgcaaggtatggcttccccatttttcattgcttttccagcttttgataccacctacagacattggtttaagaagagattggaagtccacaactccttggatatgttcttggataacatcgacaagatgatcgaacaaaagcgtagaaacgtttacgaaaacgctgaaacctcttcatctgacgaagaaaaggatttgttgaccttgatgatcgagtccgaaacaaaaggtgctggtgaaagaatgtctgatgaagaattgagatccaacctgtgtattttcttcttggctggtcatgataccactgctaatactttggctgctatcttgtacgaattggccaaacatccagaaattcaagaaagagctagacaagaagccatcagaattttaggtgatggtccagaagatattgtcccaactttcgaccaattgaaagagctgtcttacatcaacatgatcatcaaagaaaccttgagaaggcatccaccagcttatgctactactgatagagttactcaagaggacttgatgttaggtggaatgcatattccaaaaggttccggtttggctattgacatctatttgttgcatcacaacccagatgtttgggctgatccattcgaattcaaaccagaaagatttgctccaggtggtgaagctgaacatcaaaaaggtattgcttgggctccattttcaaatggtggtagacaatgtgttggcatgaacttctcattgactgaacaacgtgttctgatcccaatgttgttgaagaagtttacttggaccttgccaaatgactctccacacaaagaagaactgttgaaaagaggtatagcctggggtttagttaccttttctgataaggttaagatcaacttcaaaaagaggcactcctaa

SEQ ID NO: 220 - protein, 532 aa, Rhizopus microsporus
MLTVAVKDKIHRLIRVILPFLKSRAGVLSISSAAILAVLYSLVQKFNRPPSQLRHLPYVDRFTFLKYGFKDIPYDQYGKEKLLPLLKAGTNGIYLRCTIEGWSVRLANPIAIKQFTLKQEYTFPKATDNGGVEGSLIKKFLGGPNIVFLSGADWKRHRKIANLAFQRSMPIKLFGKLTKKMFESMEDLGYDNVDVNDLFQRFTLDAIGIGGFGFDFNALSDKDSQWVRNYESIVQGMASPFFIAFPAFDTTYRHWFKKRLEVHNNLDMFLDNIDKMIEQKRKNVYENAETSSSDEEKDLLTLMIESETKGAGERMSDEELRSNLCIFFLAGHDTTANTLAAILYELAKHPEIQERARQEAIRILGDGPEDIVPTFDQLKELSYINMIIKETLRRHPPAYATTDRVTQEDLMLGGMHIPKGSGLAIDIYLLHHNPDVWADPFEFKPERFAPGGEAEHQKGIAWAPFSNGGRQCVGMNFSLTEQRVLIPMLLKKFTWTLPKGSPHKEELLKRGIAWGLVTFSDKVKINFKKRHS

SEQ ID NO: 221 - DNA, 1599 bp, Rhizopus microsporus
  source 1..1599: mol_type = other DNA
atgttgaccgttgccgttaaggataagatccatagattgatcagagtgatcctgccattcttgaaatctagagctggtgttttgtccatttcctctgctgctattttggctgtcttgtactctttggttcagaagtttaatagaccaccatctcagttgagacacttgccatatgttgatagattcaccttcttgaagtacggcttcaaggatattccatacgaccaatacggtaaagaaaagttgttgcctttgttgaaggctggtactaatggtatctacttgagatgtactatcgaaggttggtctgttagattggctaatccaattgccattaagcagttcactttgaagcaagagtacacttttccaaaggctactgataatggtggtgttgaaggttccttgatcaaaaagtttttaggtggtcccaacatcgtgtttttgtctggtgctgattggaagagacatagaaagattgctaacttggccttccaaagatctatgccaatcaagttgtttggcaagctgaccaaaaagatgttcgagtctatggaagatttgggttacgataacgttgatgtcaacgatttgttccaaaggtttaccttggatgccattggtattggtggttttggttttgattttaacgccctgtctgataaggattcccaatgggttagaaactacgaatctatcgttcaaggtatggcttccccatttttcattgcttttccagcttttgataccacctacagacattggtttaagaagagattggaagtccacaacaacctggatatgttcttggataacatcgacaagatgatcgagcaaaagagaaagaacgtttacgaaaacgctgaaacctcctcatctgatgaagaaaaggatttgttgaccctgatgatcgaatccgaaacaaaaggtgctggtgaaagaatgtcagacgaagaattgagatctaacttgtgtatcttcttcttggctggtcatgataccactgctaatactttggctgctatcttgtacgaattggccaaacatccagaaattcaagaaagagctagacaagaagccatcagaattttaggtgatggtccagaagatatcgttccaactttcgaccaattgaaagagctgtcctacatcaacatgatcatcaaagaaaccttgagaaggcatccaccagcttatgctactactgatagagttactcaagaggacttgatgttaggtggaatgcatattccaaaaggttccggtttggctattgacatctatttgttgcatcacaacccagatgtttgggctgatccattcgaattcaaaccagaaagatttgctccaggtggtgaagctgaacatcaaaaaggtattgcttgggctccattttcaaatggtggtagacaatgtgttggcatgaacttctcattgactgaacaacgtgttctgatcccaatgttgttgaagaagtttacttggactttgccaaagggttctccacacaaagaagaattattgaagagaggtatagcctggggtttagttactttttccgataaggttaagatcaacttcaaaaagaggcactcctaa

SEQ ID NO: 222 - protein, 535 aa, Mucor circinelloides f. circinelloides 1006PhL
MIFIHKLVQTLNTKADVLVKLVGPKLRTKTGAASISTAVALALLYTAIKKYLRPPKELRHLATVPYFDFLSYAFRDELFENYSKDKVMPLFKKGANGVYVRPNVIGWNVELANPLIVKHVLLKPETTFPKATMDLGASGTLIHQFLGGPSMVFLSGADWKRHKKIANPAFQRSMPVKIFGNLTIKMFETMESYDTNTIDVLDLFERLTLDAIGLAGFDFDFNALGDKNNKWVHYYDSIKIGMANPFFMIFPAFDTKWVHWFKKRQQVHENMAKFKENLDNIITEKRALVAKNMTDGLESEKDLLTLMIESEMSLGGETMSNEELRSNLYLFMLAGHDTSSNTLAFTLYELAQNPEIQKRAREEVIRVLGDSPEDIIPTLEQTKQLTYINMIMKETMRRHPPAYNTTARVATEDINMAGVYIPKGTEMCLDIYNLHHNPDVWMDPYKFDPERFAPGGEADKQQGIAWAPFSNGARQCIGMNFSLVEQRVVLSMLLKKYTWTLPADSPHKETLQNRGIAWGLVITKDKLDLIFEKRY

SEQ ID NO: 223 - DNA, 1608 bp, Mucor circinelloides f. circinelloides 1006PhL
  source 1..1608: mol_type = other DNA
atgatcttcatccacaagttggtccaaaccttgaataccaaagctgatgttttggttaagttggtcggtccaaaattgagaacaaaaactggtgctgcttctatttctactgctgttgctttggctttgttgtacactgctatcaaaaagtatctgaggccaccaaaagaattgagacatttggctactgttccttacttcgactttttgtcttacgctttcagagatgagttgttcgagaattactccaaggataaggttatgcccttgttcaaaaaaggtgctaacggtgtttacgttagaccaaatgttattggttggaacgtcgaattggctaacccattgattgtcaaacacgttttgttgaagccagaaaccacttttccaaaggctactatggatttgggtgcttctggtactttgatccatcaatttttaggtggtccctccatggtttttttgtctggtgctgattggaagagacataagaagattgctaatccagccttccaaagatctatgccagttaagatttttggcaacctgaccatcaagatgttcgagactatggaatcttacgataccaacaccattgatgtcttggacttgttcgaaagattgaccttggatgctattggtttggctggttttgatttcgattttaacgctttgggtgacaagaacaacaagtgggttcattactacgactccattaagattggtatggccaatccattcttcatgatttttccagcttttgacactaagtgggtccattggtttaagaaaagacaacaggttcacgaaaacatggccaagttcaaagaaaacttggacaacatcatcaccgaaaagagagctttggttgctaagaatatgaccgatggtttggaatccgaaaaggatttgttgaccttgatgatcgaatccgagatgtcattaggtggtgaaactatgtctaacgaagagttgagatccaacctgtacttgtttatgttggctggtcatgatacctcttctaatactttagctttcaccttgtacgagttggctcaaaacccagaaatccaaaaaagagccagagaagaagttatcagagtcttgggtgattccccagaagatattattccaaccttggaacaaactaagcagctgacctacatcaacatgattatgaaggaaaccatgagaaggcatccaccagcttataacactactgctagagttgctactgaggatattaacatggctggtgtttacattccaaagggtacagaaatgtgcttggacatctataacttgcatcacaatccagatgtttggatggacccatacaaattcgatccagaaagatttgctcctggtggtgaagctgataagcaacaaggtattgcttgggctccattttctaatggtgctagacaatgtatcggcatgaacttctcattggttgaacaaagggttgtcctgtctatgttgttgaaaaagtacacttggactttgccagctgattctccacacaaagaaacattgcaaaacagaggtatagcctggggtttagttatcactaaggataagttggacctgatcttcgaaaagaggtactga

SEQ ID NO: 224 - protein, 535 aa, Mucor ambiguus
MIFINQLIQTLNTKADVLVKLVGPKLRTRTGAASISTAIALALLYTAIKKYMRPPKQLRHLATVSYFDFLSYAFRDELFENYSKEKVMPLFKKGANGVYVRPNVIGWNVELANPLIVKHVLLKPETTFPKATMDLGASGTLIHQFLGGPSMVFLSGADWKRHKKIANPAFQRSMPVKTFGNLTIKMFKTMESYDTNTFDVLDLFERLTLDAIGLAGFDFDFNALGDKNNKWVHYYDSIKIGMANPFFMIFPAFDTKWVHWFKKRQQVHDNMAKFKENLDNIITEKRALVAKNMSDGLESEKDLLTLMIESEMSLGGETMSNEELRSNLYLFMLAGHDTSSNTLAFTLYELAQNPEIQKKAREEVIRILGDSPEDTIPTLEQTKQLSYVNMIMKETMRRHPPAYNTTARVATEDINMAGVYIPKGTEMCLDIYNLHHNPDVWMDPYKFDPERFAPGGEADNQQGIAWAPFSNGARQCIGMNFSLVEQRVVLSMLLKKYTWTLPADSPHKDTLQNRGIAWGLVITKDKLDLIFEKRY

SEQ ID NO: 225 - DNA, 1608 bp, Mucor ambiguus
  source 1..1608: mol_type = other DNA
atgatcttcatcaaccagctgatccaaaccttgaataccaaagctgatgttttggttaagttggtcggtccaaaattgagaactagaactggtgctgcttctatttctactgctattgctttggctttgttgtacaccgctatcaaaaagtatatgaggccacctaagcaattgagacatttggctactgtttcttacttcgacttcttgtcttacgctttcagagatgagttgttcgagaactactccaaagaaaaggttatgcccttgttcaaaaagggtgctaatggtgtttacgttagaccaaatgttatcggttggaacgttgaattggctaacccattgattgtcaagcacgttttgttgaagccagaaactacttttccaaaggccactatggatttgggtgcttctggtactttgatccaccaatttttaggtggtccatccatggtttttttgtctggtgctgattggaagagacataagaagattgctaatccagccttccaaagatctatgccagttaagacttttggcaacttgaccatcaagatgttcaagaccatggaatcttacgataccaacacctttgatgtcttggacttgttcgaaagattgaccttggatgctattggtttagctggttttgatttcgatttcaacgctttgggtgacaagaacaacaaatgggttcattactacgactccattaagatcggtatggctaatccattcttcatgatttttccagctttcgataccaagtgggttcactggtttaagaaaagacaacaagttcacgataacatggccaagttcaaagaaaacttggacaacatcatcaccgaaaagagagctttggttgctaagaatatgtccgatggtttggaatccgaaaaggatttgttgaccttgatgatcgaatccgagatgtcattaggtggtgaaactatgtctaacgaagagttgagatccaacctgtacttgtttatgttggctggtcatgatacctcttctaatactttagctttcaccttgtacgagttggctcaaaacccagaaattcaaaagaaggccagagaagaagtcatcagaattttgggtgattctccagaagataccattccaactttggaacaaactaagcagttgtcctacgtcaacatgattatgaaggaaaccatgagaaggcatccaccagcttataacactactgctagagttgctaccgaagatattaacatggctggtgtctatattccaaagggtactgaaatgtgcttggacatctataacttgcatcacaatccagatgtttggatggatccttacaagttcgatccagaaagatttgctcctggtggtgaagctgataatcaacaaggtattgcttgggctccattttctaatggtgctagacaatgtatcggcatgaacttctcattggttgaacaaagggttgtcctgtctatgttgttgaaaaagtacacttggactttgccagctgattcaccacataaggataccttgcaaaacagaggtatagcatggggtttagttatcaccaaggataagttggacttgatcttcgaaaagaggtactaa

SEQ ID NO: 226 - protein, 533 aa, Syncephalastrum racemosum
MDTILQLYEYYVLPLAGRTDKALRKHKKISIGLAVALTTVYIITQKMLKPPKALRQVPYVSTLPYLRARYNGQPLSEVVEKYTMPVALKEDHGLYARYDAGGWFLHITTPKLAKQFLLKTDIFAKAVRTKKLEGTIAGRFIFGRNILITNGAEWKKHRKIANPAFHRSMPVELFGQLTHKLFKAMDSPDVDYEAVDFHDLMTRWTLSAIGSAGFGFDFKALEDKDNEWVQTYDRISTAMKDFKYLLFPFFDRNFLWLNRSRRAIHEDLTRFLTLIDGVIENKRRVLEEQEANDTKESERDLLTLMIESEKAGEGALTNEELKSNLCIFFLAGHDTTANALTFAIYYLAVNPDIQEKARQEAIGAFGDDPADILPTAEETKDLQYINCIIKETLRIAPPATGVLARGLTADTEMAGMVFPKGTRVMLNIYELHHNPRVWANPEKFDPDRFLPGGEGERLASNGAGMAWVPFSNGGRQCIGANFSLAEQRVLLPLLLRKFEWRLPEGSPHKDKPITGNTGVLCLTDLKISFKKRY

SEQ ID NO: 227 - DNA, 1602 bp, Syncephalastrum racemosum
  source 1..1602: mol_type = other DNA
atggacaccatcttgcagttgtacgagtattatgttttgccattggctggtagaactgataaggctttgagaaagcacaagaagatctctattggtttggctgttgctttgaccaccgtttacattattacccagaaaatgttgaagccaccaaaggcattgagacaagttccatatgtttctaccttgccatatttgagagctagatacaatggtcagccattgtctgaagttgttgaaaagtatacaatgcccgtcgccttgaaagaagatcacggtctatacgctagatatgatgctggtggttggttcttgcatattactactccaaaattggccaagcagttcctgttgaaaactgatatttttgccaaagccgttaggaccaaaaagttggaaggtactattgccggtagattcattttcggtaggaacattttgattaccaacggtgctgaatggaagaagcacagaaaaattgctaatccagccttccatagatcaatgccagttgaattatttggtcagttgacccacaagttgttcaaggctatggattctccagatgttgattacgaagctgttgatttccatgacttgatgactagatggaccttgtctgctattggttctgctggttttggttttgattttaaagccttggaggacaaggataacgaatgggttcaaacctacgatagaatttctaccgctatgaaggactttaagtacctgttgttcccattcttcgaccgtaatttcttgtggttgaatagatctagaagggccatccatgaagatttgactagattcttgaccttgatcgatggtgtcatcgaaaacaagagaagagtcttggaagaacaagaagccaacgataccaaagaatccgaaagagatttgctgactttgatgatcgaatctgaaaaagctggtgaaggtgctttgactaacgaagaattgaagtctaacctgtgtatcttcttcttggctggtcatgatacaactgctaacgctttgacttttgccatctattacttggctgttaacccagacattcaagaaaaagctagacaagaagctattggcgcttttggtgatgatccagcagatattttaccaaccgctgaagaaacaaaagacctgcagtatattaactgcattatcaaagaaaccttgaggattgctccaccagctactggtgttttggctagaggtttgactgctgatactgaaatggctggtatggtttttccaaagggtactagagttatgctgaacatctacgaattgcatcacaatccaagagtttgggccaatccagaaaagtttgatccagatagatttctgccaggtggtgagggtgaaagattggcttctaatggtgcaggtatggcttgggttccattttcaaatggtggtagacaatgtattggtgccaatttctcattggccgaacaaagagttttgttgcctttgctgttgagaaagtttgaatggcgtttgccagaaggttctccacataaggataagccaattactggtaataccggtgttttgtgtttgaccgacttgaagatctcctttaagaagaggtactaa

SEQ ID NO: 228 - protein, 537 aa, Parasitella parasitica
MILFNKLIQVLNTKADVLVRIMGPKLRTTAGVASISTAVVLALLFTAVKMYMKPPKELRHLITMDYFSFLGYVFRDELFETYSNEMVMPLFKKGANGIYVRPTVIGWHVELANPLIVKHVLLKPESTFPKAKMDVGISGTLIHRFLGGPSIVFLSGADWRRHKKIANPAFQRSMPVKTFGNLTLKMFKTMESYGTNTIDVLDIFERLTLDVIGIAGFDFDFNALGDKNNKWVYYYDSVKLGMASPFFVLFPAFDTKWVHWFKKRQQIHDNMTKFKENLDNIITQKRALVARNMSNGLESEKDLLTLMIESEMSLGSETMSDEELRSNLYLFMLAGHDTSSNTLAFTLYELAKNPEIQKRVREEVLQILGDSPEDIIPTLEQTKQLNYLNMVMKETMRRHPPVYNTTARIATEDINMAGIYIPKGTEMRLDIYNLHHNPDVWKDPYTFDPERFAPGGEADNQEGIAWMPFSNGARQCIGMNFSLVEMRVVLSMLLKKFTWTLPANSPHKDTLQNRGLAWGLVINNDKLDIIFEKRYQS

SEQ ID NO: 229 - DNA, 1614 bp, Parasitella parasitica
  source 1..1614: mol_type = other DNA
atgatcctgttcaacaagctgatccaagtcttgaataccaaggctgatgttttggttagaatcatgggtccaaagttgagaactactgctggtgttgcttctatttctacagctgttgttttggctttgttgttcactgctgttaagatgtatatgaagccaccaaaagaactgagacacttgattactatggactacttctctttcttgggctacgtttttagagatgagttgttcgaaacctactccaacgaaatggttatgcccttgtttaagaaaggtgctaacggtatctatgttagaccaactgttattggttggcatgtcgaattggctaatccattgattgtcaagcacgttttgttgaagccagaatctacttttccaaaggccaaaatggatgttggtatctccggtactttgatccatagatttttaggtggtccctccatcgtttttttgtctggtgctgattggagaaggcataagaaaattgctaacccagctttccaaagatccatgccagttaagacttttggtaacttgaccctgaagatgttcaagaccatggaatcttatggtacaaacaccatcgatgtcttggatatcttcgaaagattgaccttggatgttatcggtattgctggttttgatttcgatttcaatgccttgggtgacaagaacaacaagtgggtttattactacgactccgtcaaattaggtatggcttctccatttttcgttttgtttccagcttttgataccaagtgggtccattggttcaagaaaagacaacaaatccacgacaacatgaccaagttcaaagaaaacttggacaacatcatcacccaaaagagagctttggttgctagaaatatgtccaacggtttggaatccgaaaaggacttgttgaccttgatgatcgaatctgaaatgtccttgggttctgaaaccatgtctgatgaagaattgaggtccaacttgtacttgtttatgttggctggtcatgacacctcttctaatactttggcttttaccttgtacgagttggctaagaacccagaaatccaaaaaagagtcagagaagaagtcttgcagatcttgggtgattctccagaagatattattccaaccttggaacagaccaagcagttgaattacttgaacatggttatgaaggaaaccatgcgtagacatccaccagtttacaacactactgctagaattgctaccgaggatattaacatggctggtatctatattccaaagggcactgaaatgagactggacatctataacttgcatcacaatccagatgtttggaaggatccatacactttcgatccagaaagatttgctccaggtggtgaagctgataatcaagagggtattgcttggatgccattttctaatggtgctagacaatgtatcggcatgaacttctcattggtcgaaatgagagttgtgctgtctatgttgttgaagaagttcacttggactttgccagctaattctccacataaggataccttgcaaaacagaggtttggcttggggtttagttatcaacaacgataagttggacatcatcttcgagaagagataccagtcttga

SEQ ID NO: 230 - protein, 532 aa, Syncephalastrum racemosum
MDQLVTYYNSYLIPFTVQAEKVVKKHKAASISIAVALAAAYFITEKVIKPPKALRQLPRPNFINFLRDSLSTATLHEIAHKYTLPAAAQNENGLYARFDAQGWCAVITSPALAKKFLLKSDLFAKVDLGKTLQGTISGKFMFGPNIVITQGLEWKKHRKIANPAFNRSMPVQLFARLTNKAFDVMEAEMENGVIDIQEFFIRWTLDAIGLAGFGFDFKAVEDKNSSWVTTYNAINDALHDIKFAIFPSLDKEYLWLFPKRQKLHKRLDEFLHMIDDVIENKRRVLKEQKESDVEESERDLLTLMIESELKGEGALTDEELKSDLCIFFVAGHDTTANALAFTMYYLAANPHIQKKARKEVIEALGDEPTDIVPTVEQTRSLRYIDCVIKETLRIASPAIGLVARYCTEDTELGGIVFPKGTRFNLDIYGLHHDPRIWDSPDDFRPERFLPGGEAEQLATSGLGMAWVPFGNGARQCIGMNFSLAEQRTMLPLLLRKYEWSLPPNSPHRERPVTTNMGILSPIDLKLKFEKRY

SEQ ID NO: 231 - DNA, 1599 bp, Syncephalastrum racemosum
  source 1..1599: mol_type = other DNA
atggatcagttggtcacctactacaactcctatttgattccattcaccgttcaagctgaaaaggttgttaagaaacataaggccgcctccatttctattgctgttgctttggctgctgcttacttcattactgaaaaagttatcaagccaccaaaggccttgagacaattgccaagaccaaactttatcaacttcttgagggattctttgtctactgctaccttgcacgaaattgctcataagtacactttgccagctgctgctcaaaacgaaaatggtctatatgctagattcgatgctcaaggttggtgtgctgttattacttctccagctttggctaagaagttcttgttgaagtctgatttgttcgccaaggttgatttgggtaaaacattgcaaggtactatctccggtaagtttatgttcggtccaaacatcgttattacccaaggtttggaatggaagaagcacagaaaaattgctaacccagctttcaacagatctatgccagttcaattattcgccagattgactaacaaggccttcgatgttatggaagctgaaatggaaaacggtgttatcgacattcaagagttcttcattagatggaccttggatgctattggtttggctggttttggttttgatttcaaagccgtcgaagataagaactcctcttgggttactacttacaacgctattaacgatgccttgcatgatattaagttcgctatctttcccagcctggacaaagaatatttgtggttgtttccaaagaggcagaagttgcataagagattggatgaattcttgcacatgatcgatgatgtcatcgaaaacaagagaagggtcctgaaagaacagaaagaatccgatgttgaagaatctgaaagagacttgttgaccttgatgatcgagtctgaattgaaaggtgaaggtgctttgactgacgaagaattgaaatccgatttgtgcattttcttcgttgctggtcatgatacaactgctaatgcattggctttcaccatgtattacttggctgctaatccacacattcaaaagaaggccagaaaagaagttattgaagctttgggtgatgaacctactgatatcgttccaactgttgaacaaaccagatccttgaggtacattgattgcgttatcaaagaaaccttgaggattgcttcaccagctataggtttggttgctagatactgtactgaagatactgaattaggtggcatcgtttttccaaagggtactagattcaacttggatatctacggcttacatcacgatccaagaatttgggattctccagatgatttcagaccagaaagatttttgccaggtggtgaagctgaacaattggctacttctggtttaggtatggcttgggttccatttggtaatggtgctagacaatgtatcggtatgaatttctcattggccgaacaaagaactatgttgcctttgttgttgagaaagtacgaatggtctttgccaccaaattctccacatagagaaagaccagttactaccaacatgggtattttgtccccaatcgatttgaagttgaagttcgaaaagaggtactaa

SEQ ID NO: 232 - protein, 529 aa, Lichtheimia ramosa
MDQVLHFYNTYVIPYLTTHKRESRISISAAIGLLTLYWTYDKVFRPPRQIRGIPQAPFFGILKAMFTSKPIDDLARITLPIATQSPSGLYTRFDQNGWNVRITRPEAAKKFLLKTDLFVKSSASKARKGTLGGRFIFNAGNILTLNGSEWKTHRKIANPAFHRSMPIELFGKLTKKMIYVMDQAKGPIEFHNMTSRITLDAIGLAGFGFDFNAIGDENSEWTKMYADFTSAQRNPVFFLLPWLDQDPLLHLFPKRRRAHQDLTKFLNKMDEIIIHKRKVLEESNHSNQQHMDDHDKDLLTLMLEAQRQDGEVVLTNEELKSNLCIFFLAGHDTTANALNMAIYHMAMNQDVQKKAREEALRVLGDKPEDVMPDSEQVKSLPYIDMVIKETLRINPPASAIFNRTPVEDTDLDGVFIPKGQSVGLDIYNLHHNPTVWKDPEVFDPERFTPGGEYDQLSTTGMPWLPFSSGSRICIGMNFSMDEQRVILSMLLRKFEWDLPQDSPHRKKLILEGLGIAKAPNMYVQFNRRY

SEQ ID NO: 233 - DNA, 1590 bp, Lichtheimia ramosa
  source 1..1590: mol_type = other DNA
atggaccaagtcttgcacttctacaacacctatgttattccatacttgactacccacaagagggaatccagaatttctatttctgctgccattggtttgttgaccttgtattggacttacgacaaggtttttagaccaccaagacaaattagaggtattccacaagctccattcttcggtattttgaaggctatgtttacctccaagccaattgatgatttggccagaattactttgccaatcgctactcaatctccatctggtctatacactagattcgatcaaaatggttggaacgtcagaattacaagaccagaagctgctaagaagttcttgttgaaaactgacttgttcgtcaagtcctctgcttctaaagctagaaaaggtactttaggtggtaggttcattttcaacgctggtaacattttgaccttgaacggttctgaatggaaaacccatagaaagattgctaacccagctttccatagatcaatgccaattgagttgttcggtaagctgaccaaaaagatgatctacgttatggatcaagccaagggtccaattgaattccataacatgacttccagaatcaccttggatgctattggtttggctggttttggtttcgattttaacgctattggtgacgaaaattctgagtggactaagatgtacgctgatttcacttctgctcaaagaaacccagttttctttttgttgccatggttggatcaagatcctttgttgcatttgttcccaaaaagaagaagggcccatcaagatttgactaagttcttgaacaagatggacgagatcatcatccacaagagaaaggttttggaagagtccaaccactccaatcaacaacatatggatgatcacgataaggacctgttgactttgatgttggaagctcaaagacaagatggtgaagttgttttgaccaacgaagagttgaagtctaacctgtgtattttcttcttggctggtcatgatacaactgctaatgctttgaatatggccatctaccacatggctatgaatcaagatgttcaaaagaaggctagagaagaagccttgagagttttgggtgataagcctgaagatgttatgccagattctgaacaggttaagtccttgccttacatcgatatggttatcaaagagactttgaggattaacccaccagcttccgctattttcaatagaactccagttgaagataccgatttggacggtgtttttattccaaagggtcaatctgttggtctggacatctataacttgcatcataatccaaccgtttggaaggatccagaagtttttgatccagaaagattcactccaggtggtgaatatgatcaattgtctactactggtatgccttggttgccattttcttcaggttctagaatctgcatcggtatgaacttctctatggatgaacaacgtgtgatcctgtccatgttattgagaaagtttgaatgggatttgccacaagattccccacacagaaaaaagttgattttggaaggtttgggtattgctaaggctccaaatatgtacgtccaattcaacagaaggtactaa

SEQ ID NO: 234 - protein, 529 aa, Lichtheimia corymbifera JMRC:FSU:9682
MDQALNIYNTYVFPFLTTHKRQARVSISAAIGLLTLYWAYDKIFRPPRQLRGIPQAPFFGILKALFTSKPIDELARITLPVANKSPSGLYMRFDQNGWNVRITRPESAKKFLLKTDLFVKDSVSKSRKETLGGRFIFSAGNILTLNGQDWKMHRKVANPAFHRSMPIDLFGKLTKKMIYAMDQAKGPIEFHNMTSRITLDAIGLAGFGFDFNAIGDENNEWTKMYGDFTVAQRNPVFFMLTWLDQEPLLRLFPKRRKAHQDLTKFLNKLDEIIIHKRQVLEGTIKNDQQPLDDRDKDLLTLMLEAQQHDGEAVMTNEELKSNLCVFFLAGHDTTANALNFAVYYMAMNKDIQEKAREEAIRVLGDNPEDVIPNSEQVKSLPYIDMVIKETLRMNPPASAIFARKPTEDTDLDGVFIPKGQSVALDIYQLHHNPTVWKDPEVFDPERFSPGGEYDQLSTTGMPWLPFSSGSRVCIGMNFSMDEQRVVLSMLLRKYEWDLPQDSPHRKKLMLEGLGLTKAKNMFVQFDRRY

SEQ ID NO: 235 - DNA, 1590 bp, Lichtheimia corymbifera JMRC:FSU:9682
  source 1..1590: mol_type = other DNA
atggaccaagccttgaacatctacaacacttacgttttcccattcttgactacccataagagacaagccagagtttctatttctgctgctattggtttgttgaccttgtattgggcttacgacaagatttttagaccaccaagacaattgagaggtattccacaagctccattcttcggtattttgaaggctttgtttacctccaagccaatcgatgaattggctagaattactttgccagttgctaacaaatctccatcaggcttgtacatgagattcgatcaaaatggttggaacgtcagaattaccagaccagaatctgctaagaagttcttgttgaaaaccgacttgttcgttaaggactccgtttccaaatctcgtaaagaaactttaggtggcaggttcattttttccgctggtaacattttgaccttgaacggtcaagattggaagatgcatagaaaggttgctaatccagctttccatagatccatgccaattgatttgttcggtaagctgaccaaaaagatgatctacgctatggatcaagctaagggtccaattgaattccataacatgacttccagaatcaccttggatgcaattggtttggctggttttggttttgatttcaacgctattggtgacgaaaacaacgaatggactaagatgtacggtgatttcactgttgctcaaagaaacccagttttcttcatgttgacttggttggatcaagaacctttgttgaggttgtttcccaaaagaagaaaggcccatcaagatttgactaagttcttgaacaagctggacgaaatcatcatccacaaaagacaagttttggagggcaccattaagaacgatcaacaaccattggatgatcgtgataaggacttgttgactttgatgttggaagcccaacaacatgatggtgaagctgttatgactaacgaagagttgaagtctaacctgtgcgtttttttcttggctggtcatgatacaactgctaacgctttgaatttcgccgtttattacatggctatgaacaaggacattcaagaaaaggctagagaagaagccattagagttttgggtgataacccagaagatgtcattccaaattccgaacaggttaagtccttgccttacatcgatatggtcatcaaagaaacgttgagaatgaatccaccagcctctgctatttttgctagaaaacctactgaagataccgatttggatggtgtttttatcccaaagggtcaatctgttgctttggacatctaccagttgcatcataatccaactgtttggaaggatccagaagttttcgatccagaaagattttctccaggtggtgaatacgatcaattgtcaactactggtatgccttggttgccattttcttcaggttctagagtatgcatcggtatgaacttctctatggatgaacaaagggttgtcctgtctatgttgttgagaaagtatgaatgggatttgccacaagattccccacacagaaaaaagttgatgttagaaggtttgggtttgaccaaggccaagaatatgtttgttcaattcgacaggcgttactaa

SEQ ID NO: 236 - protein, 532 aa, Absidia repens
MNTLQFIRETGIEQFYHQWIQPRLRDKKAIGIAVAIALLYSLHRKITKPPANLRHLPWLGFYKYHKAILSNVTVDQFSRDITLPVMEKSSGAFLQPMVGYWIIQLTDPIAIKQLLQKIDIFPKSKINQGDDGSLMYRFIGGDNILMLNGDDWKRHRKIANPAFTRAMPVKLFGELTTTMFKAMDGLGKKIDVLDLFSRVTIDTIGKAGFGFDFNALTNRNSEWVENYDNVKEGMLDPFFLVFPTCDTTLLKWFPKRQKVHDQLTHFLEMLAGIIEDRRKTMKEARENGTEQLVEAHERDLLTLMIECEENENATLSNEELRRNLCIFFLAGHDTTAFTLSFMIYELAVNPEMQERARKEAIAILGDDPYDKLPDIEDTKQMSYINAVMKETMRLHNPVLSTTAREATKDCVLNGIFIPKGSLVSADILDVHRNPKVWTSPYEFNPDRFLPGGEAEQKTSAGTAWIPFSSGGRICVGMNFSLVEQRVILSMLLRKYKWKLPSDSIHANGLKTHGVAFGIISSTNLDIDFEKRY

SEQ ID NO: 237 - DNA, 1599 bp, Absidia repens
  source 1..1599: mol_type = other DNA
atgaacaccctgcagttcattagagaaaccggtattgaacaattctaccaccaatggattcagccaagattgagagataagaaggctattggtattgctgttgctattgccttgttgtactccttgcatagaaagattacaaagccaccagctaacttgagacatttgccatggttgggtttttacaagtaccataaggccatcttgtctaacgttaccgttgatcaattttccagagatatcaccttgccagtcatggaaaaatcttccggtgcttttttacaacctatggttggttactggatcatccaattgacagatccaattgccattaagcagttgttgcaaaagatcgacattttccccaagtccaagatcaatcaaggtgatgatggttctttgatgtacagattcataggtggtgacaacatcttgatgttgaatggtgatgattggaagaggcacagaaagattgctaatccagcttttactagagccatgccagttaagttgtttggtgaattgactaccactatgttcaaggctatggatggtttgggtaagaagattgacgttttggacttgttctccagagttaccattgataccattggtaaagctggtttcggtttcgattttaacgctttgactaacagaaactccgaatgggttgaaaactacgacaatgtcaaagaaggtatgttggacccattcttcttggtttttccaacttgtgataccaccttgttgaagtggtttccaaaaagacaaaaggtccacgatcaattgacccacttcttggaaatgttggccggtattattgaggatagaagaaagactatgaaggaagccagagaaaacggaacagaacaattggttgaagctcacgaaagagatttgttgaccttgatgatcgaatgcgaagaaaacgaaaacgccactttgtccaatgaagagttgagaagaaacctgtgtatctttttcttggctggtcatgataccactgctttcacattgtctttcatgatctacgaattggctgtcaacccagaaatgcaagaaagagctagaaaagaagccattgccattttgggtgatgatccatatgataagttgccagatatcgaagataccaagcagatgtcttacattaacgctgtcatgaaggaaaccatgaggttgcataatcctgttttgtctactactgctagagaagctactaaggattgtgttttgaacggtatcttcatcccaaagggttctttggtttctgccgatattttggatgttcacagaaatccaaaggtttggacttctccatacgaattcaatccagatagatttttgccaggtggtgaagctgaacaaaaaacttctgctggtactgcttggattccattttcttcaggtggaagaatttgcgtcggtatgaatttttcattggtcgaacaaagggtcatcctgtctatgttgttgagaaagtacaaatggaagctgccatccgattctattcatgctaatggtttaaagacccatggtgttgctttcggtattatctcttctaccaacttggatatcgacttcgaaaagaggtactaa

SEQ ID NO: 238 - protein, 547 aa, Lichtheimia corymbifera JMRC:FSU:9682
MPIVSTLAHRASTWLLPGLEKIIHVYSTVVMPHLRQRKAFVVPLIAMATMTLALYRFYRKISRPPASLSHLPYCDFWTTIKYYMTNGLVQDYSHQVILPTLAAGSGVFARFGPEGWVVDIADPIAAKQMLLKTDNFPKSETTMGVQGTLIERYVGGPNIVFLNGHDWKRHRKIANPAFHRAFPVKLFGTLAQNMFKAIDDDSNGKINVLDIFTRLTLDAIGTAGFGFNFNALGDKDNKWVSGYNSIREGMVKPLYILMPIFDTKFVHLIPDRQKAHDNLTDFLNMLDTIINDKREQIAAKKAADIEDHEKDLLTLMIESEMNPESEGAVMSNEELKSNLCIFFLAGHDTTAFALSCAIYELAKNPDVQEKARQEVIRILGDESCDVLPSVEQTKEMTYLNTIIKETLRLHNPLLTMTTRTTVEDCELGGVFIPKDTKIDVDIYNLHRNPRVWSNPDEFIPDRYAPGGEAERQPGSGLAWVPFSNGGRQCIGMNFSLAQQRVVLAMLLRKYTFELPKDTIHKNDIEKRGIVFGMITIENLDIVFNRRY

SEQ ID NO: 239 - DNA, 1644 bp, Lichtheimia corymbifera JMRC:FSU:9682
  source 1..1644: mol_type = other DNA
atgcccatcgtttctaccttggctcatagagcttctacttggttgttgccaggtttggaaaagatcatccatgtttactctaccgttgttatgccacacttgagacaaagaaaggcttttgttgttccattgattgctatggctactatgactttggccttgtacagattctacagaaagatttctagaccaccagcctcattgtctcatttgccatattgtgatttctggacgaccatcaagtactacatgactaatggtttggtccaagactactcccatcaagttattttgccaactttggctgctggttctggtgtttttgctagatttggtccagaaggttgggttgttgatattgctgatccaattgctgctaagcagatgttgttgaaaactgacaatttccccaagtctgaaactaccatgggtgttcaaggtactttgatcgaaagatatgttggtggtccaaacatcgttttcttgaatggtcatgattggaagaggcatagaaagattgctaatccagctttccatagagcctttccagttaagttgtttggtactttggctcaaaacatgttcaaggccattgatgatgattccaacggtaagattaacgtcttggatatcttcaccagattgaccttggatgctattggtacagctggttttggttttaactttaacgctttgggtgacaaggataacaaatgggtttctggttacaactccatcagagaaggtatggttaagcccttgtatatcttgatgccaatcttcgataccaagttcgttcatttgatcccagatagacaaaaggcccatgataacttgactgacttcttgaatatgttggacacgatcatcaacgacaagagagaacaaattgctgccaaaaaggctgccgatattgaagatcacgaaaaggatttgttgaccctgatgatcgaatctgaaatgaacccagaatctgaaggtgctgttatgtctaacgaagagttgaagtctaacctgtgtattttcttcttggctggtcatgacactactgcttttgctttgtcttgtgctatctacgaattggctaagaacccagatgtacaagaaaaggctagacaagaagtgatcagaatcttgggtgatgaatcctgtgatgttttgccatctgtcgaacagacaaaagaaatgacctacctgaacaccatcatcaaagaaaccttgagattgcacaaccccttgttgactatgactactagaactaccgttgaggattgtgaattaggtggtgttttcattccaaaggataccaagatcgatgtggacatctataacttgcatagaaacccaagagtttggtctaatccagacgaattcattccagatagatatgctccaggtggtgaagctgaaagacaaccaggttctggtttggcttgggttccattttctaatggtggtagacaatgtatcggcatgaatttctcattggctcaacaaagggtagttttggctatgctgttgagaaagtacactttcgaattgccaaaggacaccatccataagaacgatatcgaaaagagaggtatcgttttcggtatgatcaccatcgaaaacttggacatcgtctttaacagaaggtactaa

SEQ ID NO: 240 - protein, 533 aa, Absidia glauca
MAILQLLQQHGLEQFYMDWILPRLKERRTVGITLAIALLYALHRKITTPPSYLRHLPVLGFYSFYKAILSNVTVDQYSKDVCLPVMLKSPGAFVRPTVGFWTIQLTDPIAIKQLLTKTDIFPKSELNQGLTGTLMHRFIGGENIVMLNGEDWKRHRKIANPAFNRAMPVKLFGELTATMFKTMEETGPKIDVLDLFSRITIDTIGKAGFGFDFHALENKNNEWVENYDSIKEGMLDPFFLVFPFLDTTLLNWFPKRQQIHRKLDKFLEMLGGIIEERRASLKQAKLDNSSGNSVDVQDRDLLTLMIECEQSENATLSNDELRRNLCIFFLAGHDTTAFTLAFMIYELAVNPDMQDRARKEAIEILGDDSQDKLPTIEDTKKMTYINAVMKETMRLHNPVLNTTSREATEDCYLNDIFIKKGSLVCADILDVHRNPKVWNSPYEFNPDRFLPGGEAEQHSSSGLSWIPFSSGGRICVGMNFSLVEQRVVLSMLLRKYTWKLPGDSIHANGLKTHGVAFGIISTKDLNIEFEKRY

SEQ ID NO: 241 - DNA, 1602 bp, Absidia glauca
  source 1..1602: mol_type = other DNA
atggccatcttgcaactgttacaacaacatggtttggagcaattctacatggattggattttgccaaggttgaaagaaagaagaaccgttggtattaccttggctattgctttgttgtacgccttgcatagaaagattactactccaccatcttacttgagacacttgccagttttgggtttctactctttctacaaggccattttgtctaacgttaccgttgaccaatactccaaggatgtttgtttgccagttatgttgaaatctccaggtgcttttgttagaccaactgttggtttttggaccatccaattgactgatccaattgccatcaagcagttgttgactaagactgatattttccccaagtccgaattgaatcaaggtttgactggtactttgatgcacagattcattggtggtgaaaacatcgtcatgttgaatggtgaagattggaagagacacagaaagattgctaacccagcttttaatagagccatgccagttaagttattcggtgaattgactgctactatgttcaagactatggaagaaaccggtccaaagatcgatgttttggatttgttctccagaatcaccattgataccattggtaaagctggtttcggtttcgattttcatgctctggaaaacaagaacaacgaatgggttgaaaactacgactccatcaaagaaggtatgttggatccattcttcctggtttttccattcttggataccactttgttgaactggtttccaaagagacaacagatccatagaaagctggataagttcttggaaatgctaggtggtattatcgaagaaagacgtgcttctttgaagcaagctaagttggataattcctccggtaactctgttgatgtccaagatagagatttgctgaccttgatgattgaatgcgaacaatctgaaaacgccaccttgtctaatgacgaattgagaagaaacctgtgtatcttctttttggctggtcatgataccactgcttttactttggctttcatgatctacgaattggctgttaacccagatatgcaagacagagctagaaaagaagccattgaaatcttgggtgatgactcccaagataagttgccaactattgaagataccaaaaagatgacctacatcaacgccgttatgaaggaaactatgagattgcacaatcccgttttgaacactacttctagagaagctactgaggattgctacttgaacgatatcttcatcaaaaagggttccttggtttgcgccgatattttggatgttcatagaaatcctaaggtctggaattccccatacgaattcaatccagatagatttttgccaggtggtgaagctgaacaacattcttcttcaggtttgtcttggatcccattttcatctggtggtagaatttgtgtcggtatgaacttctcattggttgaacaaagggttgtcctgtctatgttgttgagaaagtacacttggaaattgcctggtgactctattcatgctaacggtttgaaaactcatggtgttgccttcggtattatctctactaaggatttgaacatcgagttcgagaagaggtactga

SEQ ID NO: 242 - protein, 538 aa, Choanephora cucurbitarum
MNQLSSLKNTATIQNLLELYNTYVLPNLTKRNKKIGISAAIVFSMIYFLDRILKPPKHLRQFPYVSYYTVIKSAVRGEAIRDFDTRVIAPLLDNSSNQAVYLRPLGTGWNIMIADPELAKTVFLKTENFPKAVMPHNIKETALGRFLGENSIVVSNGQEWKSQRKLANPAFHRSMPVNLFGKLTLDFFEVIDQDDGHVDFTDLIQRWTLEAIGKAGFGFDFNAIKEKDNDWVNTYNAINAGFTNPIYLLFPFLDQKDSFLLSPARRKVHYHMTRFLNMVDQIILQKRQAVKEGNLENDYLAENEKDLLTLMIEGELRGEGMMSNDDMRNNVCVFFLAGHDTTANTLAFAIYYLATRPEIQQRAREEAIKVLGDEPRDVLPTLEQTREFVYINQVMRETLRINGPVSRVVSREATEDFFLHDTLIPKGTPVNVDINAIHHNKKFWTKPYEFDPSRFAEDGEGTTRKAGSGMAWLPFGSGARQCIGMNFSLYEQRVFLSMLLRRYTWKLPENSIHKNGVIPVGASITSPAKLDIDFTRRY

SEQ ID NO: 243 - DNA, 1617 bp, Choanephora cucurbitarum
  source 1..1617: mol_type = other DNA
atgaaccagctgtcctctttgaagaacactgctactattcaaaacctgttggagctgtacaacacttacgttttgccaaacttgaccaagaggaacaagaagattggtatttctgctgccatcgtgttctctatgatctacttcttggataggattctgaaaccaccaaagcacttgagacaattcccatacgtttcttactacaccgttattaagtctgccgttagaggtgaagctattagagattttgataccagagttatcgcccctttgttggacaattcttctaatcaagccgtttacttgaggccattaggtactggttggaacattatgattgctgatccagaattggctaagaccgttttcttgaaaactgagaatttcccaaaggccgttatgccacataacatcaaagaaactgctttgggtagattcttgggtgaaaactctatcgttgtttccaatggtcaagaatggaagtcccaaagaaaattggcaaatccagctttccataggtctatgccagttaatttgttcggtaagttgaccttggatttcttcgaagttatcgatcaagatgatggtcacgttgatttcaccgatttgattcaaagatggaccttggaagctattggtaaagctggttttggtttcgatttcaacgccatcaaagagaaggataacgattgggttaatacctacaacgctattaacgctggtttcaccaatccaatctatctgttgttcccattcttggatcaaaaggactcattcttgttgtctccagctagaagaaaggttcattaccatatgaccaggttcttgaacatggttgaccaaatcatcttgcaaaagagacaagctgtcaaagaaggtaacttggaaaacgattacttggccgaaaacgaaaaggacttgttgactttgatgatcgaaggtgaattgagaggtgagggtatgatgtctaatgatgacatgagaaacaacgtctgcgtttttttcttggctggtcatgatacaactgctaacactttggcttttgccatctactatttggctaccagaccagaaattcaacaaagagctagagaagaagccatcaaggttttgggtgatgaacctagagatgttttgcctactttggaacaaactagggaattcgtttacatcaaccaggttatgagagaaaccttgagaatcaatggtccagtttctagagttgtgtctagagaagctactgaggactttttcttgcacgatactttgattccaaagggtactccagttaacgttgatattaacgccatccaccataacaagaagttttggactaagccatacgaattcgacccatctagatttgctgaagatggtgaaggtactactagaaaagcaggttctggtatggcttggttgccatttggttctggtgctagacaatgtattggtatgaacttcagcttgtacgaacagagggttttcttgtctatgttgttgagaagatacacctggaagttgccagaaaattccattcataagaacggtgttattccagttggtgcctctattacttcaccagctaaattggatatcgacttcactagaaggtactga

SEQ ID NO: 244 - protein, 550 aa, Absidia glauca
MSLFSSSPIQTNKQTTNNTMETIQELVDQVSQRLATPKSRNTVVSIGAALSLILLYLAADRTVRPPRKLRHIPYMSYIQFMKMAIQRKPTGDISRTLSVPLMEGHGQRSVFLKPDRMGWMLHIANPDAAKQFFLKTDIFRKADLSSEEGTLSRKFLGGDNIVFADDKDVWRKHRKLVNPAFHRSKPVKLFGALTNKTMRVLDDTNEQPIDITLLMERFTLEVIGKAGFGFDFDSILDHNNKWVKAYELVKSGITDPLFFLLPWLDQKFLWLFPDRQRKHEALKRFQAMLDDVIESKRRILKESYVANGSRNEHDDAEKDLLTLMLEGELSGEGVLTDEELKSNLNVFFLAGHDTTANALSFAIHALARDPDLQQKAREEAISVLGDAPEDVYPTSEDIKQFHFINRVIKETLRFSGPATTGTPRRTTQDTEVAGYYVPKGTPVVVNIYDLHHNPTLWNDPEKFDPSRFVDGGESDQKAGGGIAYAPFYNGQRMCIGMQFSLDEQRVMLSCLLRKFEWRLPEDSEHKENVVTSTVGLLTPRNLKIIFKRRY

SEQ ID NO: 245 - DNA, 1653 bp, Absidia glauca
  source 1..1653: mol_type = other DNA
atgtccctgttctcctcctctccaattcaaactaacaaacaaactaccaacaacaccatggaaaccatccaagaattggttgatcaagtctctcaaagattggctactccaaagtctagaaacaccgttgtttcaattggtgctgccttgtctttgatcttgttgtatttggctgctgatagaactgttagaccaccaagaaagttgagacatatcccttacatgtcctacatccagtttatgaagatggccattcaaagaaagccaaccggtgatatttctagaacattgtctgttccattgatggaaggtcatggtcaaagatctgttttcttgaagccagatagaatgggttggatgttgcatattgctaatccagatgctgctaagcagttcttcttgaaaaccgatattttcagaaaggccgacttgtcatctgaagaaggtactttgtctagaaagttcttaggtggtgacaacatcgttttcgctgatgataaggatgtttggagaaagcacagaaagttggttaatccagctttccatagatccaagccagttaagttgtttggtgctttgactaacaagaccatgagagttttggatgataccaacgaacagccaattgatatcaccttgttgatggaaagattcaccttggaagttattggtaaggctggttttggtttcgatttcgattccatcttggatcacaacaacaaatgggtcaaagcttacgaattggtcaagtctggtattaccgatcctctgttttttttgttgccatggttggaccaaaagttcttgtggttgtttccagacagacagagaaaacatgaagccttgaaaagattccaagccatgttggatgatgtcatcgaatccaagagaaggatcctgaaagaatcttacgttgctaacggttccagaaacgaacatgatgatgctgaaaaggatctgttgaccttgatgttggaaggtgaattgtctggtgaaggtgttttgactgatgaagagttgaagtctaacctgaacgtttttttcttggccggtcatgatacaactgctaatgctttgtctttcgctattcatgctttggctagagatccagacttacaacaaaaagctagagaagaagccatctccgttttgggtgatgctccagaagatgtttatccaacttccgaagatatcaagcagttccacttcatcaacagggttatcaaagaaaccttgagattttctggtccagctactactggtactcctagaagaactactcaagatactgaagttgctggttactacgttccaaaaggtactccagttgttgttaacatctacgacttgcatcataacccaactttgtggaatgatccagaaaagttcgatccatccagattcgttgatggtggtgaatctgatcaaaaagctggtggtggtattgcttatgctccattttacaacggtcaaagaatgtgcatcggtatgcaattttctttggacgaacaaagggttatgctgtcttgtttgttgagaaaattcgaatggcgtttgccagaagattccgaacacaaagaaaacgttgttacttctaccgttggtttgttgactccaagaaacttgaagatcattttcaagaggcgttactaa

SEQ ID NO: 246 - protein, 524 aa, Absidia repens
MDQVNTLIKDFGIPKPSKSTILSIGAAISVSYLCWKIIRLIKPPRKLSHIPHISFYCHVKSIIERKPYSQISREFVMPLLISSSTIGYLKPDALGWTLNITNPEATKDFFLKTDIYPKANFKVGKGTLFQNFIGDDNIAFASGGNEWKKHRKLVNPAFHKNMPIKLFTTLTHKVFKVLDDANEKPINATKLLERFTLQAIGLAGFGFDFDAILNPDSEWVTVYANIRAGIADPLYFVFPWLDQKLLWLLPKRQEAHRLSDRFHGMMDGLIEEKRQLLRQQKTKHDQDECADAEKDILTLMLEAELSGEGTLTHEELKSNLNVFFLAGHDTTANALSAAIYHLATHPMIQQKARDEALSILGDDPEDVFPTLQEIKRFKYINQIIKETLRFHAPAINGLPRVVTQDTELAGVFLPKGTPVLVNTYDLHHNPCVWTNPDRFDPARFDKDSDAELRPSMSWVPFYNGQRMCIGMQFSLMEQRVLLSCLLRKYEWRLPDDSKHKDELITGNIGLLVAKDLDVIFKRRY

SEQ ID NO: 247 - DNA, 1575 bp, Absidia repens
  source 1..1575: mol_type = other DNA
atggaccaagtcaacacgttgatcaaggattttggtattccaaagccatccaagtccaccattttgtctattggtgctgctatctctgtttcttacttgtgctggaagatcatcagattgattaagccaccaagaaagttgtcccacattccacatatttctttctactgccacgtcaagtccatcattgaaagaaaaccatactctcagatctccagggaatttgttatgcctttgttgatctcctcttccaccattggttatttgaagccagatgctttaggttggactctgaacattactaatccagaagctaccaaggacttcttcttgaaaactgatatctacccaaaggccaacttcaaagttggtaagggtactttgttccagaacttcattggtgatgataacattgcttttgcctctggtggtaacgaatggaagaaacatagaaagttggttaacccagccttccataagaatatgccaatcaagttgttcaccactttgacccataaggttttcaaggttttggatgatgctaacgagaagccaatcaatgctactaagttgttggaaagattcaccttgcaagctattggtttggctggttttggttttgatttcgatgctatcttgaacccagattctgaatgggttactgtttacgctaacattagagctggtattgccgatccattatactttgtttttccatggttggaccaaaagctgttgtggttgttgccaaaaagacaagaagctcacagattgtccgatagatttcatggtatgatggacggtttgatcgaagaaaaaagacagttgttgagacagcaaaagaccaagcacgatcaagatgaatgtgctgatgctgaaaaggatatcttgaccttgatgttggaagctgaattgtctggtgaaggtactttgactcatgaagagttgaagtctaacctgaacgtttttttcttggctggtcatgatacaactgctaatgctttgtctgctgcaatctatcatttggctactcatccaatgattcagcaaaaggctagagatgaagccttgtcaattttgggtgatgatccagaagatgttttcccaacattgcaagaaatcaagaggttcaagtacatcaaccagatcatcaaagaaaccttgagattccatgctccagctattaacggtttgccaagagttgttactcaagatactgaattggccggtgtttttttgccaaaaggtactccagttttggttaacacttacgacttgcatcataacccatgtgtttggacaaatccagatagatttgatccagccagattcgataaggattcagatgctgaactaaggccatctatgtcttgggttccattttacaatggtcagagaatgtgcatcggtatgcaattctcattgatggaacagagagttctgttgtcttgcttgttgagaaagtatgaatggcgtttgccagatgattctaagcacaaggatgaattgatcaccggtaacattggtttgttggttgctaaggatttggacgtcatctttaagagaaggtactaa

SEQ ID NO: 248 - protein, 546 aa, Absidia repens
MAMDRINLFIENLNKRFPQRVSSKTGLLAIISLVILYRQTIGKLIHPPRQLRHIPHVNYIQFFIMSMVQKKPLSVISKALTMPLLDTSAVYLKPERLGWTVHVATPEAAKQFFLKTDIYAKANAYTTQKDTLFYKFIGPKNILFEHDKNEWKKHRKLVNPAFHKSKPVKLFGVLGHKVFKIVDEANGKPIDVTSLMERYTLDVIGQAGFGFDFDAIIHKDNDWVTVYNDILNAVTDPLYFFLPFLDSHFRWLLRDRRKKYELVEKFHGMITGVIEKKRQILQEKYSKKMQDNSNDTSHDDEDDGEKDLLTLMLESEFSEGGSILTNDEVKSNLNVFFLAGHDTTANALSFAIHALARHPDIQQKAREEAIRVLGDEPHDVLPTYEDIRQFDYINQVIKETMRFHGPVTTGMPRQTTEDTNLVGIHLPKGTPIVVDIYDLHHNPHVWDDPETYDPSRFAPGGEADQKASATGSKDGSAMAWSPFFNGQRMCIGMQFSLEEQRVILSCLLRKYEWRLPEDSIHKNEAVTTNIGVLTAKNLDIIFKRRY

SEQ ID NO: 249 - DNA, 1641 bp, Absidia repens
  source 1..1641: mol_type = other DNA
atggccatggacagaatcaacttgttcatcgaaaacctgaacaagagattcccacaaagagtttcttctaagactggtttgttggccatcatttccttggttatcttgtacagacaaaccatcggtaagttgatccatccaccaagacaattgagacatatcccacatgttaactacatccagttcttcatcatgtccatggttcaaaagaagccattgtccgttatttctaaggctttgactatgcctttgttggatacttctgctgtttacttgaagccagaaagattaggttggactgttcatgttgctactccagaagctgctaagcaattcttcttgaaaactgatatctacgctaaggctaacgcttacactactcaaaaggataccttgttctacaagttcatcggtccaaagaacatcttgtttgaacacgataagaacgagtggaagaagcacagaaaattggttaatccagccttccataagtccaagccagttaagttgtttggtgttttgggtcacaaggtgttcaagatagttgatgaagctaacggtaagccaatcgatgttacttctttgatggaaagatacaccttggatgttattggtcaagctggttttggtttcgatttcgatgccattatccacaaggataacgattgggttactgtctacaacgatattttgaacgctgttactgatcccctgtacttttttttgccattcttggattctcacttcaggtggttgttgagagatagaagaaagaagtacgaactggtcgaaaagttccatggtatgattactggtgtgatcgaaaagaagagacagatcctgcaagaaaagtactccaagaagatgcaagataactccaacgatacctctcatgatgacgaagatgatggtgaaaaggatttgttgaccttgatgttggaatccgaattttctgaaggtggttccattttgactaacgacgaagttaagtctaacctgaacgtttttttcttggctggtcatgatacaaccgctaatgctttgtcttttgctattcatgctttggccagacatccagacattcaacaaaaagctagagaagaagctatcagagttttgggtgatgaaccacatgatgttttgccaacctacgaagatatcagacaattcgattacatcaaccaggtgatcaaagaaaccatgagattccatggtccagttactactggtatgccaagacaaactactgaagataccaacttggttggtatccatttgccaaaaggtacaccaatcgttgttgacatctatgacttgcatcataatccacacgtttgggatgatccagaaacttatgatccatctagatttgctccaggtggtgaagctgatcaaaaagcttctgctactggttctaaagatggttctgctatggcttggtcaccatttttcaatggtcaaagaatgtgcatcggtatgcagttctcattggaagaacaaagagtcatcttgtcttgcctgttgagaaagtatgaatggcgtttgccagaagattccattcataagaatgaagctgttaccaccaacatcggtgttttgactgctaagaacttggatatcatcttcaagaggcgttactaa

SEQ ID NO: 250 - protein, 522 aa, Rhizopus microsporus
MDHLIQVYNSSTQVLIPVLQKRSKASYITAAIALIIAQRLYSYFRVPKHLRGFPKLPYFGIAKSFFAKESPRERVKKYILPIINERDGFYISNIPFGWMLYVTNPIAAKQILLKSNGFPKNHGLLEDMGENLFIEFIGKDNVVLTNGDTWKRQRKVMNPAFHHSLPIKTMSNVVFSLISVIDQANGTVPVASTMQNFTLDTLGLAIFGFDFKALQGDGDEWTKTYRLVSDCLFDPIINVFSSYSFIFDRIYPRRRRGAMATRKLGEKFLEIAQQKRMEIKSGAFADVPDNEKDLLTLMLEAEEKGDVWTSEDELRHNIAVLFLAGHDTTAHALSFCFYHLAKNKDIQQKLRKEVLDLLGDEPVDVVPTVEQLKDMQYLNMVIKENLRMNSPADMLFSRDVQEDIVLANTFIPKGTVISINIEALHCNPKLWHNPDQFDPERFAPGGEYEQHEGMTWLPFSNGTRQCLGMNFSLFEQRLVIAMILKKYEISIPEDSIHRNHIINDMSFTGAPKSLELTFTKRY

SEQ ID NO: 251 - DNA, 1569 bp, Rhizopus microsporus
  source 1..1569: mol_type = other DNA
atggaccacttgatccaggtctacaactcttctactcaagttttgattccagtcttgcagaagagatctaaggcttcttatattaccgctgccattgctttgattattgcccaaagactgtactcctacttcagagttccaaaacatttgagaggtttcccaaagttgccatactttggtattgctaagtcattcttcgccaaagaatctccaagagaaagagtcaagaagtacatcttgccaatcatcaacgaaagagatggcttctacattagcaacattccatttggttggatgctgtacgttaccaatccaattgctgctaagcaaatcctgttgaagtctaacggttttccaaaaaaccacggtttgctagaagatatgggtgagaatttgttcatcgagttcatcggtaaggataacgttgttttgactaacggtgatacctggaagagacaaagaaaggttatgaatccagccttccatcattccttgcctattaagactatgtccaacgtcgttttctccttgatctccgttattgatcaagctaatggtactgttccagttgcttctactatgcaaaacttcaccttggatactttgggtttagccattttcggttttgactttaaggcattgcaaggtgatggtgatgaatggactaagacttacagattggtttccgattgcttgttcgacccaattatcaacgttttcagctcctactccttcatcttcgatagaatctacccaagacgtagaagaggtgctatggctactagaaaattgggtgaaaagttcttggaaatcgcccagcaaaaaaggatggaaatcaaatctggtgctttcgctgatgttccagataacgaaaaagatctgttgaccttgatgttggaagctgaagaaaaaggtgatgtctggacttctgaagatgaattgagacataacattgccgttttgttcttggctggtcatgatacaactgctcatgctttgtctttctgcttttaccatttggctaagaacaaggacatccagcagaagttgagaaaagaagttttggatttgttgggtgatgaaccagttgatgttgttccaactgttgaacaattgaaggacatgcagtacttgaacatggtcatcaaagaaaacctgaggatgaattctccagccgatatgttgttttccagagatgttcaagaggatatcgttttggctaacacctttattccaaagggtactgtcatctccattaacattgaagccttgcattgcaatccaaagttgtggcataatccagatcaattcgatccagaaagatttgctccaggtggtgaatatgaacaacatgaaggtatgacttggctgccattttcaaatggtactagacaatgtctgggcatgaacttcagtttgtttgaacagagattggtgatcgccatgatcttgaagaagtacgaaatttccattccagaggactccatccatagaaaccatatcattaacgacatgtctttcactggtgctccaaagtctttagaattgactttcaccaagaggtactaa

SEQ ID NO: 252 - protein, 522 aa, Rhizopus azygosporus
MDHLIQVYNSSTQVLIPVLQKRSKASYITAAIALIIAQRLYSYFRVPKHLRGFPKLPYFGIAKSLFTRESPRERAKKYVLPIVDEHNGFYISNIPFGWMLYVTNPIAAKQILLKSNGFPKNHGLLDDMGENLFIEFIGKDNVVLSNGDTWKRQRKVMNPAFHHSLPIKTMSKVVFSLISVIDQANGTVPVASAMQNFTLDTLGLAIFGFDFKALQGDPDEWTKTYRLVSDCLFDPVINVFSSYSFIFDRIYPRRRRGVIATRKLGEKFLEIAQQKRMEIKSGAFADVPNNEKDLLTLMLEAEEKGDVWTSEDELRHNIAVLFLAGHDTTAHALSFCFYHLAKNKDIQQKLRKEVLDLLGDEPVDVVPTVEQLKDMQYLNMVIKENLRMNSPADMLFSRDVQEDIVLANTLIPKGTVISINIEALHCNPKFWHNPDQFDPERFAPGGEYEQHEGMTWLPFSNGTRQCLGMNFSLFEQRLVIAMILKKYEISIPEDSIHRNHIISDMPVTGAPKSLELTFTKRY

SEQ ID NO: 253 - DNA, 1569 bp, Rhizopus azygosporus
  source 1..1569: mol_type = other DNA
atggaccacttgatccaggtctacaactcttctactcaagttttgattccagtcttgcagaagagatctaaggcttcttatattaccgctgccattgctttgattattgcccaaagactgtactcctacttcagagttccaaaacatttgagaggtttcccaaagttgccatactttggtattgctaagtctttgttcaccagagaatctccaagagaaagagctaagaaatacgttttgccaatcgttgatgaacacaacggtttctacattagcaacattccatttggctggatgttgtacgttaccaatccaattgctgccaagcaaatcttgttgaagtctaacggttttccaaagaaccacggtttgttggatgatatgggtgaaaacttgttcatcgagttcatcggtaaggataacgttgtcttgtctaatggtgatacctggaagagacaaagaaaggttatgaatccagccttccatcattccttgcctattaagactatgtccaaggtcgttttctccttgatctccgttattgatcaagctaatggtactgttccagttgcttctgctatgcaaaatttcaccttggatactttgggtttagccatctttggttttgactttaaggcattgcaaggtgatccagatgaatggactaagacttacagattggtttccgattgcttgttcgatccagttatcaacgttttcagctcctactccttcatcttcgatagaatctatccacgtagaagaagaggtgttattgctactagaaaattgggcgaaaagttcttggaaatcgcccaacaaaaaaggatggaaatcaagtctggtgcttttgctgatgttccaaacaacgaaaaggatctgttgaccttgatgttggaagctgaagaaaaaggtgatgtctggacttctgaagatgaattgagacataacattgccgttttgttcttggctggtcatgatacaactgctcatgctttgtctttctgcttctatcatttggctaagaacaaggacatccagcagaagttgagaaaagaagttttggatttgttgggtgatgaaccagttgatgttgttccaactgttgaacaattgaaggacatgcagtacttgaacatggtcatcaaagaaaacctgaggatgaattctccagccgatatgttgttttccagagatgttcaagaggatatcgttttggctaacaccttgattccaaagggtactgttatctccattaacattgaagccttgcattgcaatccaaagttttggcataatccagatcaattcgacccagaaagattcgctccaggtggtgaatatgaacaacatgaaggtatgacttggctgccattttcaaatggtactagacaatgtctgggcatgaacttcagtttgtttgaacagagattggtgatcgccatgatcttgaagaagtacgaaatttccattccagaggactccattcatagaaaccacatcatttctgatatgccagttactggtgctccaaagtctttagaattgactttcaccaagaggtactaa

SEQ ID NO: 254 - protein, 522 aa, Rhizopus azygosporus
MDRVVQAYNNFIKALVPVLQKRSKASYITAAIALIIAQRLYSYFRVPKHLRGFPKLSYFGIAKSFLTRESPRERAKKYVLPIIDKHDGFYISKIPFGWTLYATNPIAAKQILLKSSAFPKNHGQIDDMGENLFTEFIGKDNVALSNGDTWKRQRKVMNPAFHQSLPIKTMSNVVFSLISVIDQANGTIPVASAMQNFTLDTLGLAIFGFDFKALQGDPDEWTKTYRLVSDCLFDPVINVFSSYSFILDRIYPRRRRGVIATRKLGEKFLEIAQQKRMEIKSGVYADVPDNEKDLLTLMLEAEEKGGVWTSEDELRHNIAVLFLAGHDTTAHALSFCFYHLAKNKDIQQKLRKEVLDLLGDEPVDVVPTVEQLKDMQYLNMVIKENLRMNSPADMLFSRDVQEDITLANTLVPKGAVVSINIEALHCNPKLWHNPDQFDPERFAPGGEHEQHDGMTWLPFSNGTRQCLGMNFSLFEQRLVIAMILKKYEISIPEDSIHRDHIVSDASFNGAPKSLELTFTKRY

SEQ ID NO: 255 - DNA, 1569 bp, Rhizopus azygosporus
  source 1..1569: mol_type = other DNA
atggacagagttgttcaggcctacaacaactttattaaggctttggttccagtcttgcagaagagatctaaagcttcttatattaccgctgccattgccttgattattgctcaaagactgtactcctacttcagagttccaaaacatttgagaggtttccccaagttgtcttactttggtattgctaagtctttcctgaccagagaatctccaagagaaagagctaagaaatacgtcttgccaatcatcgacaaacacgatggtttctacattagcaagattccatttggttggaccttgtacgctactaatccaattgctgctaagcagatcttgttgaagtcatctgcttttccaaagaaccacggtcaaattgatgatatgggtgaaaacttgttcaccgagttcattggtaaggataacgttgctttgtctaacggtgatacttggaagagacaaagaaaggttatgaacccagctttccatcaatccttgcctattaagactatgtccaacgtcgttttctccttgatctccgttattgatcaagccaatggtactattccagttgcttctgctatgcaaaacttcaccttggatactttgggtttagccattttcggttttgactttaaggcattgcaaggtgatccagatgaatggactaagacttacagattggtttccgattgcttgttcgatccagttatcaacgttttcagctcctactccttcattttggatagaatctacccaagacgtagaagaggtgttattgctactagaaaattgggcgaaaagttcttggaaatcgcccaacaaaaaaggatggaaatcaagtctggtgtttacgctgatgttccagataacgaaaaggatttgttgaccttgatgttggaagccgaagaaaaaggtggtgtttggacttctgaagatgaattgagacataacattgccgttttgttcttggctggtcatgatacaactgctcatgctttgtccttttgcttttaccatttggctaagaacaaggacatccagcagaagttgagaaaagaagttttggacttgttgggtgatgaaccagttgatgttgttccaactgttgaacaattgaaggacatgcagtacttgaacatggtcatcaaagaaaacctgaggatgaattctccagccgatatgttgttttccagagatgttcaagaagatatcaccttggctaacacattggttccaaaaggtgctgttgtttccattaacattgaagccttgcattgcaatccaaagttgtggcataatccagatcaattcgacccagaaagatttgctccaggtggtgaacatgaacaacatgatggtatgacttggttgccattttctaacggtactagacaatgtctgggtatgaacttcagcttgtttgaacagagattggttatcgccatgatcttgaagaagtacgaaatctccattccagaggactccattcatagagatcatatcgtttctgatgcctcttttaatggtgctccaaagtcattggaattgaccttcactaagaggtactaa

SEQ ID NO: 256 - protein, 533 aa, Bifiguratus adelaidae
MEGVKFSLARLNARNLQVWLRNFVQQVRERKGFVLLLLGYLVVYRLYSAIVTVPSSLKHLKATNRIKDYQYMLQGKPADVRKRLSALPVLRQTGSGVFLSGDRGVWTVAVAEPKAARTLLMKTSIFPKTIFANRPRGDIIEKWLGKDNIVNSNGDTWKKHRKPANPAFHKAMPINLFGRLTKTFFKQVELENNRVHVNKIMQRFTLDAIGNGAFDFDFQALEKPDSKEIRAYNNVMHIIFDPLNFVIPWLDAFLSKVSRARRDVHDQVDLLNDVLAKMIAKKKQSMKEGNGAGIADEDKDLLTMMLVANHEEVDGSKRLTDAQLRSDLAIFFVAGHDTTSNALTFALYHLAVNPGVQHKAREECIRVLGDTPQDIVPTAEQIKELTYTSQIIQETLRLNPPAQGTSQRLVAEDTELGGYFIPKGSMAALDIWSLHHNPNVWDDPETWNPDRFAPGGEYESKDSYSWLPFGHGQRQCIGMQFSLAEQRVFLSMLLRKYEISLPADSIHAKGLVITPQFGVLSADNLIVDLKPRY

SEQ ID NO: 257 - DNA, 1602 bp, Bifiguratus adelaidae
  source 1..1602: mol_type = other DNA
atggaaggcgtcaagttctctttggctagattgaatgctagaaacttgcaggtttggttgagaaacttcgttcaacaagtcagagaaagaaagggtttcgtcttgttgttgttgggttacttggttgtttacaggttgtactctgctatcgttactgttccctcttccttgaaacatttgaaggctaccaataggatcaaggactatcagtatatgttgcaaggtaagccagctgatgttagaaaaagattgtctgctttgccagtcttgagacaaactggttctggtgtttttttgtctggtgatagaggtgtttggactgttgctgttgctgaacctaaagctgctagaactttgttgatgaagacctctattttccccaagaccatttttgctaatagaccaagaggtgacatcatcgaaaaatggttgggtaaagataacatcgtcaactctaatggtgacacttggaagaaacatagaaagccagctaatccagctttccataaggctatgccaatcaatttgttcggtagattgactaagaccttcttcaagcaagtcgaattggaaaacaacagagttcacgtcaacaagatcatgcaaagattcaccttggatgccattggtaatggtgcttttgatttcgatttccaagctttggagaagcccgattccaaagaaattagagcttacaacaacgtcatgcacatcatctttgatccattgaacttcgttatcccatggttggatgctttcttgtctaaagtttcaagagctagaagagatgttcacgaccaagttgatttgttgaatgatgttttggccaagatgatcgccaagaaaaagcaatctatgaaggaaggtaacggcgctggtattgctgatgaagataaggatttgctgaccatgatgttggttgctaatcatgaagaagttgacggttctaagagattgactgatgcacaattgagatccgatttggccatttttttcgttgctggtcatgataccacttctaacgctttgacttttgccttgtatcacttggctgttaatccaggtgttcaacacaaagctagagaagaatgtatcagagttttgggtgataccccacaagatatagttccaactgctgaacagatcaaagaattgacttacacctctcagatcatccaagaaaccttgagattgaatccaccagctcaaggtacttctcaaagattggttgctgaagatactgaactaggtggttactttattccaaagggttctatggctgctttggatatttggtccttgcatcataatccaaacgtatgggatgatccagaaacttggaatccagatagatttgctccaggtggtgaatacgaatctaaggattcttattcttggttgccatttggtcacggtcaaagacaatgtattggtatgcaattttccttggccgaacaaagggttttcttgtcaatgttgttgaggaagtacgagatttctttgccagccgattctattcatgctaaaggtttagttatcaccccacaattcggtgttttgtccgctgataatttgatcgttgatttgaagccaaggtactaa

SEQ ID NO: 258 - protein, 525 aa, Rhizopus stolonifer
MEFSKPIIQSYQAALDKFLTMLQKNTKKSYIGIAIALITLQRIYSYFRVPKQLRHITSIPFLTIAKSQYDREPPYSRFKRLILPIISKNSGLYVSKVPFDWTVHIANPIAARQVLMKAESNPKSHEWLHNLGPNAPFYKFLGDDNVGIANGKDWKRQRKIMNPAFHRSMPIKTMASIIPSLFDLIEEEQGKIIVPAVMRDLTLDILGLTIFGFDFNSMQGSSDEWKRIYTTVNEALVDPLLNIMGPFSFLLFFFPEKKRQLDAVAKLSQKLDEIAQQKRKEVKQGLYANKPENEKDLVTLMLEAEEMGEAVTSNTELRHNIAGLFLAGHDTTAHTLSFCFYNLAKNRDVQHKLRQEVLDILGDTPMDVVPTLDQLKTMEYLNLVLKENLRHNGPADNLLPRIAKEDIIVDGTLIPKGTTVNIDIYAIHHDPKNWEDVEKFIPERFAKGGEHDGHEGLTWLPFSNGSRQCIGISFSLTEQRLILAMMVRKYEISISKDSIHYDHIIMNETATKAPDSLELIFTKRY

SEQ ID NO: 259 - DNA, 1578 bp, Rhizopus stolonifer
  source 1..1578: mol_type = other DNA
atggaattcagcaagcccatcatccaatcttatcaagctgctttggataagttcttgaccatgttgcaaaagaacaccaagaagtcctacattggtattgccattgctttgatcaccttgcagagaatctactcctatttcagagttccaaagcaattgagacacatcacctctattccattcttgactattgccaagtctcagtacgatagagaaccaccatattccagattcaagagattgatcttgccaatcatctctaagaactctggcttgtacgtttctaaggttccatttgattggaccgttcatattgctaatccaattgctgctagacaggttttgatgaaggctgaatctaatccaaagtctcatgaatggttgcataacttgggtccaaatgctccattttacaagttcttgggtgatgataatgttggtatcgctaatggtaaggactggaagagacaaagaaagattatgaacccagccttccatagatccatgccaatcaaaactatggcctccattattccatccttgttcgatttgatcgaagaggaacaaggtaagattatcgttccagctgttatgagagatctgactttagatattttgggcttgaccattttcggcttcgatttcaattcaatgcaaggttcttctgacgaatggaagaggatctacactactgttaatgaagctttggttgaccccttgttgaatattatgggtccattctcattcttgctgtttttcttccccgaaaaaaaacgtcaattggatgctgttgctaagctgtctcaaaagttggacgaaattgctcagcaaaagaggaaagaagttaagcaaggtctgtacgctaacaagcctgaaaacgaaaaagatttggtcaccttgatgttggaagctgaagaaatgggtgaagctgttacttctaacactgaattgaggcataacattgccggtttgtttttggctggtcatgatacaactgctcatactttgtctttctgcttctacaacttggctaagaacagagatgttcagcacaagttgagacaagaagttttggacattttgggtgataccccaatggatgttgttccaactttggatcaactgaaaaccatggaatacctgaacttggtcctgaaagaaaatttgagacataacggtccagccgataatttgttgccaagaattgccaaagaagatatcatcgttgacggtactttgatcccaaaaggtactaccgttaacattgatatctacgccattcatcacgatccaaagaattgggaagatgtcgaaaagttcatcccagaaagatttgctaaaggtggtgaacatgatggtcatgaaggtttgacttggttgccattttctaacggttctagacaatgcatcggtatctcattttctttgaccgaacaaaggttgatcttggctatgatggttaggaagtacgagatctccatttccaaggattctatccattacgaccacatcattatgaacgaaactgctacaaaagccccagactctttggaattgattttcaccaaacgttactaa

SEQ ID NO: 260 - protein, 526 aa, Rhizopus oryzae
MMEMAEFALESYRSTLEKILPALQKKSKKSYIGAAITLIVLHRIYSYFKVPKRFRHLPKLSYFPSAKSIFNNEPIYDRYKRLVFPVIKQNNGIYVSKISFDWTVYIANPVAAKHVLLKADLYPKSHDFLKMLGSNSPVVQFLGYDSVGITNGHVWKNQRKLMNPAFHRSMPINTMSTVIPDLFSVIEKENGAIAVPLVMRNFTLDVLGLTVFGFDFKALKGDPDEWTKTFTLANEGLFDPILNIFGPFSFVLTAIFPKRRKQMKAVAKLNGKLEQLIYQKRMEIENGAYSNTPENEKDLVALMLEAEKRGEGLTNDLELRHNIAGFFLAGHDTTANALSFCFYNLAKNKHVQNKLRQEIISVLGDDPKDVVPTLDQLKEMPYLNLVLKENLRLNGPADNILPRVAAKDMVVDGTFIPKGATVNIDIYGIHHNPKFWNNPDDFIPERLDGNGEQVSHDGLTWLPFGNGARQCLGMNFSLTEQRLLLVMMIRKYEIDVPKDSIHYERVIFGSETTPPNSLELIFKKRY

SEQ ID NO: 261 - DNA, 1581 bp, Rhizopus oryzae
  source 1..1581: mol_type = other DNA
atgatggaaatggctgaattcgccttggaatcttacagatctaccttggaaaagattttgccagccttgcaaaagaagtccaaaaagtcttatattggtgccgccattaccttgattgtcttgcatagaatctactcctacttcaaggttccaaagagattcagacatctgccaaagttgtcttactttccatccgctaagtccattttcaacaacgaacctatctacgacagatacaagagattggttttcccagtcatcaagcaaaacaacggtatctacgtttccaagatctcttttgattggaccgtctacattgctaatccagttgctgctaaacacgttttgttgaaagctgacttgtacccaaagtctcacgatttcttgaaaatgttgggttccaactctccagttgttcaatttttgggttacgattccgttggtatcactaatggtcatgtctggaagaatcagcgtaaattgatgaatccagccttccatagatccatgcctattaacactatgtccaccgttattccagatctgttctccgttatcgaaaaagaaaatggtgctattgccgttccattggtcatgagaaatttcaccttggatgttttgggtttgaccgtttttggtttcgatttcaaggctttgaaaggtgatccagatgaatggactaagactttcactttggctaacgaaggtttgttcgatccaatcttgaatatcttcggtccattctctttcgttttgaccgctatttttcccaagagaagaaagcaaatgaaggctgttgctaagttgaatggcaagttggaacaactgatctaccaaaagaggatggaaattgaaaacggtgcttactctaacaccccagaaaacgaaaaagatttggttgccttgatgttggaagctgaaaaaagaggtgaaggtttgaccaacgatttggaattgagacataacattgccggttttttcttggctggtcatgatacaactgctaacgctttgtctttctgcttttacaacctggccaagaacaaacacgttcagaacaagttgagacaagagatcatttccgttttgggtgatgatccaaaagatgttgttcctactttggaccagttgaaagaaatgccatacttgaacttggtcctgaaagaaaacttgagattgaatggtccagccgataacattttgccaagagttgctgcaaaggatatggttgttgatggtacttttattccaaagggtgccaccgttaacattgatatctatggtattcatcacaaccccaagttctggaacaatccagacgatttcattccagaaagattggacggtaatggtgaacaagtttcacatgatggtttgacttggttgccatttggtaacggtgctagacaatgtttgggtatgaacttctcattgaccgaacaaaggttgctgttggttatgatgatcagaaagtacgaaatcgatgtcccaaaggattccatccattacgaaagagttattttcggttctgaaactaccccaccaaactcattagaactgatctttaagaagaggtactaa

SEQ ID NO: 262 - protein, 527 aa, Rhizopus microsporus
MELTKIAIETYHRALDKLVPILQKRSKQSYIGVAVALVVLERIYSFFRVPKSIRHIPAVSYFAMAKSLLTAEAPSSRYKRIVLPVIKKGNGFYVSKLPLEWIVHVATPMSAKHVLLKSEIYPKSESFLKLLGPQSPVVLFLGGNNVGFVNGHEWKKQRKIMNPAFHRSMPIQTMASVMPDFFSAIDKYGDDGTPISAVMRDFTLDVLGHTAFGFDFKALKGDPDHWTRTYHIINNALFNPTANMLTSLNPILSIISPERRRILEAIKKLNGMLEAMIKQKRQEVQNNAQANVPENEKDLLTLMLEAQQRGEALATDEELKHNVSGFFLAGHDTTSETLSFYFYNIAKNKDAQRKLREELNAVLGDKPVDVIPTLEQLKSMEYLNCTIKENLRLNGPADNILPRVATEDMVVDGTPIPKGTVVNVDIHAIHHDTRYWQDPYKFVPERFLPGGEHESHSGMTWLPFGNGARQCLGMNFSLAEQRLVIAMTVRKYDIEIPRDSIHYDHPILESSSTKAPASLKLVFKKRY

SEQ ID NO: 263 - DNA, 1584 bp, Rhizopus microsporus
  source 1..1584: mol_type = other DNA
atggaattgaccaagatcgccatcgaaacttatcatagagctttggataagctggtcccaatcttgcaaaaaagatccaagcaatcctacattggtgttgctgttgctttggttgttttggaaagaatctacagcttcttcagagtcccaaagtccattagacatattccagctgtttcttacttcgctatggctaagtctttgttgactgctgaagctccatcttctagatacaagagaatagttttgcccgtcatcaagaaaggtaacggtttttacgtttccaagttgccattggaatggatcgttcatgttgctactccaatgtctgctaaacacgttttgttgaagtctgagatctacccaaagtctgagtctttcttgaaattgctaggtccacaatctccagtcgttttgtttttaggtggtaacaacgttggtttcgttaacggtcatgaatggaaaaagcagcgtaagattatgaacccagctttccatagatccatgccaattcaaactatggcttctgttatgccagatttcttctcagccattgataagtatggtgatgatggtacaccaatctctgctgttatgagagatttcaccttggatgttttgggtcatactgcttttggtttcgatttcaaggctttgaaaggtgatccagatcattggactagaacctaccatatcattaacaacgctttgttcaacccaaccgctaatatgttgacttctttgaaccctatcctgtccattatctctccagaaagaagaagaattttggaggccatcaaaaagttgaacggtatgttggaagccatgatcaagcaaaagagacaagaagttcaaaacaacgctcaagctaacgttccagaaaacgaaaaagatctgttgaccttgatgttggaggcacaacaaagaggtgaagctttggctactgatgaagaattgaagcacaatgtctctggttttttcttggctggtcatgatacaacctctgaaactttgtctttctacttctacaacattgccaagaacaaggatgcccaaagaaagttgagagaagagttgaatgctgtcttgggtgataagccagttgatgttattccaaccttggagcaattgaagtccatggaatatttgaactgcaccatcaaagaaaacttgagattgaatggtccagccgataacattttgccaagagttgctactgaagatatggttgttgacggtactccaattccaaaaggtactgttgttaacgttgatatccacgccattcatcatgataccagatattggcaagatccctacaagtttgtcccagaaagatttttgccaggtggtgaacatgaatctcattctggtatgacttggttgccttttggtaatggtgctagacaatgtttgggtatgaatttctcattggccgaacaaagattggttatcgctatgactgttaggaagtacgatatcgaaatcccaagagattccatccattacgatcatccaatcttggaatcttcatctacaaaagctccagcctcattgaagttggtttttaagaagaggtactaa

SEQ ID NO: 264 - protein, 514 aa, Rhizopus delemar RA 99-880
MALEGLLPLFQKRSKSSYIVAAILLITVKQIYSFFRVPTNLRHLPIVSFFAMVKSFLTSEPPYSRFKRITFPAIQKGNGFYVSKIPVGWTVYVANPVAAKQLLLKSDNFPKSHFGLDAIGEKSTAVQFVGRDNIFLSNGEVWKKQRKIMNPVFHRSMPIKTVASLVPLLFSAIEEANGRIMITPKMKDFTLDALGLTIFDFDFKALQGDPDHWTSIYRLVTRSIFDPISYVCSAMENFLTYTYPTKRKGFNAVVKLNAKFDRLIEKKREELQNGIFSNKPDNEKDLVTLMLEAGMQEDISITNEELRHNMAALFLAGDDSISNALSLCLYHLAKNKRVQQKLREEIINILGNGDMDIVPSLEELKQMKYMNMVIKENLRLNMPVDVLLPRKTAEDIFLAGTFIPKDTIIVIDVGALHRDPRSWKDPDEFVPERFEDDGEQNSHEGLTWIPFGNGTRQCIGMNFSLMEQRLILTMLLRKYEVDLPKNSIHYDHIVYEHPTYICPESLELIFTKRY

SEQ ID NO: 265 - DNA, 1545 bp, Rhizopus delemar RA 99-880
  source 1..1545: mol_type = other DNA
atggccttggaaggtttgttgcctttgttccaaaagaggtccaaatcctcttatatcgttgctgccattttgttgattaccgtcaagcaaatctacagcttcttcagagttccaactaacttgagacatctgccaatcgtttcttttttcgccatggtcaaatctttcttgacttctgaaccaccatactccagattcaagagaattactttcccagccatccaaaaaggtaacggtttttacgtttccaagattccagttggttggactgtttatgttgctaatccagttgctgctaagcagttgttgttgaagtctgataatttccccaagtctcactttggtttggatgctattggtgaaaagtctaccgctgttcaatttgttggtagagacaacatcttcttgtccaatggtgaagtctggaaaaagcagagaaagatcatgaacccagttttccatagatccatgccaatcaaaactgttgcttctttggttcccttgttgttctctgctattgaagaagcaaacggcagaattatgattacgccaaagatgaaggatttcaccttggatgctttaggtttgaccatcttcgattttgactttaaagccttacaaggtgatccagatcattggacttctatctacagattggttaccagatccattttcgacccaatttcttacgtttgttctgccatggaaaatttcttgacctacacttacccaactaagaggaaaggttttaacgccgttgttaagttgaacgccaagttcgatagattgatcgaaaagaagagggaagaattgcagaacggtatcttttctaacaagccagataacgaaaaggacttggttaccttgatgttggaagctggtatgcaagaagatatctccattaccaacgaagaattgagacataacatggctgctttgtttttggctggtgatgattctatttccaacgctttgtctttgtgcttgtaccatttggctaagaacaagagagtccaacagaagttgagagaggaaatcatcaacatcttaggtaatggtgacatggatatcgtcccatccttggaagagttgaaacaaatgaagtacatgaacatggtcatcaaagagaacctgagattgaacatgccagttgatgttttgttgccaagaaaaaccgccgaggatattttcttagctggtacttttattcccaaggacaccatcatcgttatagatgttggtgcattgcatagagatccaagatcatggaaagatccagatgaattcgttccagaaagattcgaagatgacggtgaacaaaattcccatgaaggtttgacttggattccatttggtaacggtactagacaatgtatcggtatgaacttcagcttgatggaacagagattgatcctgactatgttgttgagaaagtacgaagttgacctgccaaagaactccattcattacgatcatatcgtttacgaacacccaacctacatttgtccagaatctttggaattgatcttcaccaagaggtactaa

SEQ ID NO: 266 - protein, 521 aa, Rhizopus stolonifer
MNKETYDLALKKLLSVLQNRSRSSYIAAAIALITVQQVYSFLRVPRSLRGFPVVPILSITRAYLDNLSPVDRFKRIVFPVIENENGLYVSKIPFGWRLYIADPVIAKQMLLKTDNFPKDHSIADKLGKDSFMFKFFGLDNIALSNGNMWKAQRKTMNPAFYRTPPLKVMESVVLALFSAIEAEGDKFPVTKRLHDFTLDVLGLAIFDFNFNALQGDPEGWTKTYNLVIKTMLDPLFNIFPSLDFIMRHIYPTRIRGIEAVTKLNAKFDELARKKRIEIQKGVYANVPDSQKDVLTLMLESEKKGESMKTDEELRHNIAILFVAGHDTTANTLSFCLYNLAKNKDIQQKLREEVISILGDDPHSETPTLEELKKMKYMNMVIKENLRLNGPVDFLFSRKTVKEINLSGTIIPKDTAVTVDLNGIHRNPKYWANPDEFIPERFLENGEQESHEGLTWLPFSNGSRQCLGMNFSLAEQRLLLAMIVKKYEIDVPKDSKHYDHIIYESTANIAPNSLELNFTRRH

SEQ ID NO: 267 - DNA, 1566 bp, Rhizopus stolonifer
  source 1..1566: mol_type = other DNA
atgaacaaagaaacctacgacctggccttgaaaaagttgttgtctgtcttacagaacaggtccaggtcatcttatattgctgctgctattgctttgatcaccgttcaacaagtttacagctttttgagagtcccaagatctttgagaggttttccagttgttccaatcttgtctattaccagagcttacttggataacttgtctccagttgacagattcaagagaatcgttttcccagtcatcgaaaacgaaaatggcttgtacgtttccaagattccatttggttggaggttgtacattgccgatccagttattgctaagcagatgttgttgaaaaccgacaactttccaaaggatcattctatcgctgacaagttgggtaaagactctttcatgtttaagttcttcggcttggacaacattgctttgtctaatggtaatatgtggaaggcccaacgtaagactatgaatccagctttttacagaactccaccattgaaggttatggaatctgttgttttggctttgttctccgctattgaagctgaaggtgataagtttccagttaccaagagattgcatgatttcaccttggatgttttgggtttagccatcttcgattttaacttcaacgcattgcaaggtgatccagaaggttggacaaaaacttacaacttggttatcaagaccatgttggaccctttgttcaacatttttccatccttggacttcatcatgagacatatctacccaaccagaatcagaggtattgaagcagttactaagttgaacgccaagttcgatgaattggctagaaagaagagaattgagatccaaaagggtgtttacgctaacgttccagattctcagaaagatgttttgaccttgatgttggagtccgaaaaaaagggtgaatctatgaagaccgatgaagaattgaggcataacattgccattttgttcgttgctggtcatgataccactgctaatactttgtctttctgcttgtacaatctggccaagaacaaggatatccaacagaagttgagagaagaggtcatttccattttgggtgatgatccacattctgaaactccaactttggaggaactgaaaaagatgaagtacatgaacatggtcatcaaagaaaacttgagattgaacggtccagtcgactttttgttctctagaaaaaccgtcaaagagatcaacttgtccggtactattatcccaaaagatactgctgttaccgttgacttgaacggtattcatagaaatccaaagtactgggctaacccagatgagtttattcctgaaagattcttggaaaacggtgagcaagaatctcatgaaggtttgacttggttgccattctctaatggttctagacaatgtctgggtatgaacttctcattggcagaacaaagattgctgttggctatgatcgtcaaaaagtacgaaatcgatgtccccaaagattccaaacattacgatcacatcatctacgaatccaccgctaatattgctccaaactctttggaattgaacttcaccagaaggcactga

SEQ ID NO: 268 - protein, 523 aa, Rhizopus azygosporus
MNSLISIYTTSFKRLLPLIKDRPKTLCITAAILLVALQQIHSFFYVPKSIRSIPKVSYLSMAISFLYREGPPERLRRLKLPAMRKGNGFYLSRIPFGWTVYVANPIAAKQLLLKAENFPKSHFLMETVGKDSPFVQFLGPDNVVNSNGESWKKQRKVMNPAFHRSMPVKTIAGVIPTLFAVIDKYEGKVPVTSIMQEFTLDVLGLAIFNFDFGSLKGDAEKWRAEYKLVMETLFDPVTNVFTGLDFLLRYVYPKRIRGAKAVNNLNKLFDKLVKEKRLEVQNGVHVNKPQDEKDLLTLMLEAEQKGEAMTTDMEMRHNVAVFFLAGHESTAHVLSFTLYFLAKNKHVQQKLREEVNRVMGRESVDAAPTLEELRQMEYLYAVIKESLRLCSIFDVLILRDTVEDMYLDDTFIPKGTRITVDVSAIQRDSKVWNKPDDFIPERFMEGGEAEGHEGMTWLPFGGGARQCIGMNFSLTEQKVALAMLVQRYDIDVPKDSIHYENIVYERPFYLAPQSLELTFTKLH

SEQ ID NO: 269 - DNA, 1572 bp, Rhizopus azygosporus
  source 1..1572: mol_type = other DNA
atgaactccctgatctccatctacaccacatctttcaaaagactgttgccattgatcaaggatagaccaaagactttgtgtattaccgctgccattttgttggttgccttgcaacaaattcactcctttttctacgtccccaaatccattagatccattccaaaggttagctacttgtccatggctatctcattcttgtatagagaaggtccaccagaaagattgagaagattgaaattgccagccatgagaaaaggtaacggtttctacttgtctagaattccatttggttggaccgtttacgttgctaatccaattgctgctaaacagttgttgttgaaggctgaaaatttccccaagtctcacttcttgatggaaactgttggtaaggattctccattcgttcaatttttgggtccagataacgttgtcaactctaatggtgaatcctggaaaaagcaaagaaaggttatgaacccagccttccatagatcaatgccagttaagactattgccggtgttattccaactttgttcgccgttattgataagtacgaaggtaaggttccagtcacctctattatgcaagaattcaccttggatgttttgggtttagccatcttcaatttcgacttcggttctttgaaaggtgatgctgaaaaatggcgtgctgagtacaaattggttatggaaactttgtttgacccagtcactaacgttttcactggtttggatttcttgttgagatacgtctaccctaagagaattagaggtgctaaggctgttaacaacctgaacaagttgtttgacaagttggtcaaagaaaagaggttggaagttcaaaacggtgttcatgttaacaagccacaagacgaaaaggatttgttgaccttgatgttggaagctgaacaaaaaggtgaagctatgactaccgatatggaaatgagacataacgttgccgtttttttcttggctggtcatgaatctactgcccatgttttgtctttcaccttgtactttttggccaagaacaagcacgttcaacagaagttgagagaagaggttaatagagtcatgggtagagaatctgttgatgctgctccaactttagaagaattgagacagatggaatacttgtacgccgtcatcaaagaatccttgagattgtgctctatcttcgacgttttgatcttgagagataccgtggaagatatgtacttggatgatacttttatcccaaagggcaccagaattaccgttgatgtttctgctattcagagagattctaaggtttggaacaagccagatgatttcattccagaaaggtttatggaaggtggtgaagctgaaggtcatgaaggtatgacttggttgccatttggtggtggtgctagacaatgtattggtatgaatttctccctgaccgaacaaaaggttgctttggctatgttggttcaaagatacgatatcgatgttcccaaggactctatccattacgaaaacatcgtttacgaaaggccattttacttggctccacaatctttggaattgaccttcactaagttgcactaa

SEQ ID NO: 270 - protein, 524 aa, Mucor circinelloides f. circinelloides 1006PhL
MLVDKAIQTYQRLFIFLQDRKNKYACICAAIACILSHHIYRSIALPPEHLRSFPRVSTFAILNSFRNFESVPSRIKRLINPITDAGYSFYMARSPLAWNLFVADPKAAKIVLMKTDKFPKTHMFFSNSGDEAPLAMLLGKENVAVSNGEVWRKQRRIMNPAFHRSRPLKTFGKVMPYLFDAIDENPDKVMISKQIKGFTLDALGLAVFGFDFESLRGDPQRWADTYHVVMSNIFNPLSSLFIKFSFIWKRISTKFVQTQEATDRLLSMMENLADEKRRQILNGEMKNLADSEKDLLTMMIEADIEEGTKTTTTQLRQNIAFFLFAGHDTTANAISLCIYNLAKNPNVQQKLREEVSSILGNNPIIDNVPTLEDLKKMEYLDLVIKENLRRSGPVDRIVSRDATEDFIIGGTLIPKGTQVNIDIGSLHFNPKLWHNPEEFIPERFAPGGEHDSHEGFAYLPFGHGARQCIGMNFSVIEQKVVIAMLVKKYLIEVPKDSIHYNEIQFDMPMTISPESLELKFSKLE

SEQ ID NO: 271 - DNA, 1575 bp, Mucor circinelloides f. circinelloides 1006PhL
  source 1..1575: mol_type = other DNA
atgttggttgacaaggccatccaaacttaccaaaggttgttcattttcttgcaggaccgtaaaaacaagtacgcttgtatttgtgctgctattgcctgcattttgtcccatcatatctacagatctattgccttgccaccagaacatttgagatcttttccaagagtttccaccttcgctatcttgaactctttcagaaacttcgaatctgtcccatccagaatcaagagattgattaacccaattaccgatgccggttactctttttacatggctagatctccattggcttggaatttgtttgttgctgatccaaaagctgccaagatcgttttgatgaagactgataagttccccaagactcacatgttcttttctaactctggtgatgaagctcctttggctatgttgttgggtaaagaaaatgttgccgtttccaatggtgaggtttggagaaaacagagaagaattatgaacccagccttccatagatccagaccattgaaaactttcggtaaggttatgccatacttgttcgatgctattgacgaaaacccagataaggtcatgatctccaaacaaatcaagggtttcaccttggatgctttgggtttagctgtttttggtttcgatttcgaatccttgagaggtgatccacaaagatgggctgatacttatcatgttgtcatgtccaatatcttcaaccccttgtcctctctgtttatcaagttctcattcatctggaagaggatctctaccaagttcgttcaaactcaagaagctactgataggctgttgtctatgatggaaaatttggctgacgaaaagagaaggcaaatcttgaatggtgagatgaagaacttggccgattctgaaaaagatctgttgaccatgatgatcgaagccgatattgaagaaggtactaagactactactacccagttgagacaaaacattgccttttttttgttcgccggtcatgatacaactgctaacgctatttctttgtgcatctacaacttggctaagaacccaaacgttcaacagaagttgagagaagaagtctcctctattttgggtaacaacccaatcattgataacgtcccaactttggaggatctgaagaaaatggaatacttggacttggtcatcaaagagaacctaagaagatctggtccagttgacagaatcgtttctagagatgctaccgaagatttcattatcggtggtactttgattccaaagggtactcaagttaacatcgacatcggttccttgcattttaacccaaagttgtggcataatcccgaagaattcatcccagaaagatttgctccaggtggtgaacatgattctcatgaaggttttgcttacttgccatttggtcatggtgctagacaatgtattggtatgaacttctccgtgatcgaacaaaaggttgtgattgctatgttggtcaagaagtacttgatcgaagttccaaaggattccatccactacaacgaaatccaattcgatatgccaatgaccatctctccagaatctttggaattgaagttctccaagttggagtaa

SEQ ID NO: 272 - protein, 526 aa, Mucor circinelloides f. circinelloides 1006PhL
MIDTAIQTCHTALERLLPFFQDRKNRYACIGAAIACILLRHMYASIALPPRNLRSFPRVSTFAILNSFRNFESVPNRIKRLINPITDAGYSFYMARSPIAWNLFVADPKAAKIVLMKTDNFPKTHNFFGKSGDNTPVAVLLGKENVAVSNGDVWRKQRRIMNPAFHRSQPIKTFGGVMPYLFDAIDENPDKVMITKHIKAFTLDSLGLAVFGFDFQSLRGDPQKWTETYHIVMSNIFNPLSNLFIKFSFILKHVSTKFVKTQAATVRLLSMMEDLANEKRQKILNGEMKSLTDQEKDLLTLMIEADIEEGTKTTTTQLRQNIAIFFLAGHDTTANAISLCLYNLAKNPDVQQKLREEVSSILGDDPVDVVPTMDDLKKMEYLNLVIRENLRRSGPVDRIISRDATEDIIINGTHIPRGTQLNIDIGSLHFNPKLWHNPEEFIPERFAQGSEYDSHEGFAYLPFGNGARQCIGMNFSLTEQKVVMSMLVRKYLIEVPKDSIHYNEVQFDMPMTISPESLDLKFTKLY

SEQ ID NO: 273 - DNA, 1581 bp, Mucor circinelloides f. circinelloides 1006PhL
  source 1..1581: mol_type = other DNA
atgatcgataccgctatccaaacttgtcatactgccttggaaagactgttgccatttttccaagataggaagaacagatacgcttgtattggtgctgctattgcttgcattttgttgagacatatgtacgcctctattgctttgccaccaagaaatttgagatctttcccaagagtttccaccttcgctattttgaactctttcagaaacttcgagtctgtcccaaacagaatcaagagattgattaacccaattaccgatgccggttactctttttacatggctagatcaccaattgcctggaatttgtttgttgctgatccaaaagctgccaagatcgttttgatgaagactgataatttccccaagacgcataacttcttcggtaagtctggtgataatactccagttgctgttttgttgggtaaagaaaatgttgccgtttccaatggtgatgtttggagaaaacagagaagaattatgaacccagccttccatagatcccaacctattaagacttttggtggtgttatgccatacttgttcgatgctattgacgaaaacccagataaggtcatgattaccaaacatattaaggccttcaccttggactcattgggtttagctgtttttggtttcgacttccaatctttgagaggtgatccacaaaaatggactgaaacctaccatatcgtcatgtccaatatcttcaaccccttgtctaacctgttcatcaagttcagctttatcctgaaacacgtgtctaccaagttcgttaagactcaagctgctaccgttagattgctatctatgatggaagatttggccaacgaaaagaggcaaaagattttgaacggtgagatgaagtctttgaccgatcaagaaaaggatctgttgaccttgatgattgaagccgatattgaagaaggtactaagactactactacccagttgagacaaaacattgccatcttttttttggccggtcatgatacaactgctaacgctatttctttgtgcttgtacaacttggctaagaacccagacgttcaacaaaagttgagagaagaagtctcctccattttgggtgatgatccagttgatgttgttccaactatggatgacttgaagaagatggaatacctgaacttggtcatcagggaaaacttgagaagatctggtcctgttgatagaatcatttctagagatgccaccgaggatattatcatcaacggtactcatattccaagaggcacccaattgaacattgatatcggttccttgcatttcaacccaaagttgtggcataatccagaagaattcatcccagaaagattcgctcaaggttctgaatacgattctcatgaaggttttgcttacttgccatttggtaatggtgctagacaatgtatcggtatgaacttctctctgaccgaacaaaaggttgtcatgtctatgttggtccgtaagtacttgattgaagttccaaaggattccatccactacaacgaagttcaattcgatatgccaatgaccatctctccagaatctttggatttgaagttcacgaagctgtactaa

SEQ ID NO: 274 - protein, 522 aa, Mucor circinelloides f. lusitanicus CBS 277.49
MNISASYQQTLDRVISVVRKNKTSYIGMAILCVVLQRVYASYAVPPKYLRRFPKVSFVDLLKSFYNKESVASRNKRLVTPLTNAGHGFYISRIPLDWTIFVTDPIAAKTLLLKTDNFPKSHAIFGALGESSPVVKFMGNENVAMSNGDMWKKQRKIMNPAFHRSQPVKVFGSVMPDLFALIDQDPEHVFIAPRMKSFALDALGLSAFGFDFQSLKNDPEGWTSKYNTVVSSLFNPFVNLFAKYDFLIKYVSAERRRVIKATDEFNVMLSNLADKRRQEILNGEKKDIPENEKDLLTLMIEADIREGVQTTTTELRHNMAIFFLAGHDTTANTLALCLYQLAKHKHVQKKARQEVLGILGDDPCDVMPSLEDLKKLNYVNLVIKENLRRNGPVDNLMSRDTQQDIDLNGTFIPKGSKVAINVASIHMNPKIWHDPENFIPERFEQGGEFDSHDGFTWLPFSNGSRQCLGLNFSLTEQRVALCMLLKRYEIDIPKDSVHYDEIVFDKAFTFAPQSLELSFKKRY

SEQ ID NO: 275 - DNA, 1569 bp, Mucor circinelloides f. lusitanicus CBS 277.49
  source 1..1569: mol_type = other DNA
atgaacatctccgcctcttaccaacaaaccttggatagagttatctccgttgtcagaaagaacaagacctcttatattggtatggccattttgtgcgttgtcttgcaaagggtttatgcttcttatgctgttccaccaaagtacttgagaagattcccaaaggtttccttcgttgacttgttgaagtccttctacaacaaagaatccgttgcctctagaaacaagagattggttactccattgactaatgctggtcatggtttctacatttccagaattccattggattggaccatcttcgttactgatccaattgctgctaagaccttgttgttgaaaactgacaatttcccaaagtctcatgctatttttggtgccttgggtgaatcttcaccagttgttaagtttatgggtaacgaaaacgttgccatgtctaatggtgatatgtggaaaaagcagcgtaagattatgaacccagctttccatagatctcaaccagttaaggttttcggttctgttatgccagatttgttcgccttgattgatcaagatccagaacatgttttcattgccccaagaatgaagtcttttgctttggatgctttgggtttgtctgcttttggtttcgatttccagtctttgaagaatgatccagaaggttggacttctaagtacaataccgttgtctcttctctgttcaacccatttgttaacttgttcgccaagtacgacttcctgattaagtatgtttctgccgaaagaagaagagttattaaggctaccgatgagttcaacgtcatgttgtctaatttggctgataagagaaggcaagagatcttgaatggtgagaaaaaggatatcccagaaaacgagaaggatctgttgaccttgatgattgaagccgatattagagaaggtgttcaaactactactaccgaattgagacataacatggccatcttttttttggccggtcatgatacaactgctaacactttggctttgtgcttgtaccaattggctaaacataagcacgttcaaaagaaggccagacaagaagttttgggtattttgggtgatgatccatgtgatgttatgccctcattggaggatttgaagaagttgaactacgtcaacttggtcatcaaagaaaacctgagaagaaacggtccagttgacaatttgatgtctagagatacccaacaagacatcgatttgaacggtacttttatcccaaagggttctaaggttgctatcaacgttgcttctatccacatgaatccaaagatttggcatgaccctgaaaacttcattccagaaagatttgaacaaggtggtgaattcgattcccatgatggttttacttggttgccattttctaacggttctagacaatgtttgggcctgaatttctcattgactgaacaaagggttgctctgtgcatgttattgaagagatacgaaattgacatccccaaggattctgttcattacgacgaaatcgttttcgataaggcttttactttcgccccacaatcattggaattgtccttcaaaaagaggtactaa

SEQ ID NO: 276 - protein, 525 aa, Choanephora cucurbitarum
MLIENAMEIYHRIAQKTLFVLKKQPAFSYITAAIILFLSSEIYRQVAVPKHLRPFARVSFLSLVRSFMRKDSVVERNKKLIAPIVNQGHKVYVAKLPFEWSLSIADSELAKMVLLKSDMFPKSQDFRNKLGEDNIIVRFMGSENVALANGHKWKKQRKFMNPAFHRSMPINTFGNLMFRLFDRIDEQPHDFPVSIRLKNFTLDALGLAAFDFDFKALLGDPDGWTKTYDTIMKSLFDPWIFLFSNIDFILQAILPSRRQSTAAVIKFNKMLIDMAERRRQEIQRGEKKAVPDNEKDLLTLLIEADLEEGNTATNDELRENIALFFLAGHDTTGNALSFCLYNLAKNKHVQDKLREEIVSVMNDRDPDAIPTAEDFKKMPYLNMVIKENLRLSGPVDRLFSRVTTEDIVMEGHVVPKGTYINVDIASLHFNPNYWHDPQSFIPERFEDDGEHSHHAGMTWLPFSNGSRQCLGMNFSLTEQRVFLAMLLKRYVVDISKDSIHYDKVVYDKLFNFAPASLTLNFTKRQ

SEQ ID NO: 277 - DNA, 1578 bp, Choanephora cucurbitarum
  source 1..1578: mol_type = other DNA
atgttgatcgagaacgccatggaaatctaccatagaattgctcaaaagaccctgttcgtcttgaaaaagcaaccagctttctcttatattaccgccgccattattctgttcttgtcctctgaaatctacagacaagttgccgttccaaaacatctaagaccatttgctagagtgtcgttcttgtctttggttagatctttcatgagaaaggactccgttgtcgaaagaaacaagaaattgattgccccaatcgtcaatcaaggtcacaaagtttatgttgccaagttgccatttgagtggtctttgtctattgccgattctgaattggctaagatggtcttgttgaagtctgatatgttcccaaagtctcaggacttcagaaacaaattgggtgaagataacatcatcgtcaggttcatgggttctgaaaatgttgctttggctaatggtcataagtggaaaaagcagcgtaaattcatgaacccagctttccatagatccatgccaatcaatactttcggcaatttgatgttcaggttgttcgatagaatcgacgaacaaccacatgatttcccagtttctatcaggttgaagaacttcaccttggatgctttgggtttagctgctttcgattttgatttcaaggctttgttgggtgatccagatggttggacaaaaacttacgataccatcatgaagtccttgttcgacccatggattttcttgttctccaacatcgatttcatcttgcaagccattttgccatcaagaaggcaatctactgctgccgttattaagtttaacaagatgttgattgacatggccgaaagacgtagacaagaaatccaaagaggtgaaaaaaaggccgttccagataacgaaaaggatttgttgaccttgctgattgaagccgatttggaagaaggtaacactgctactaatgacgaactgagagaaaacattgccttgttttttttggctggtcatgataccactggtaacgctttgtctttttgcttgtacaatctggctaagaacaagcacgttcaggataagttgagagaagaaatcgtttccgttatgaacgatagagatcctgatgctattccaactgctgaagattttaagaagatgccctacttgaacatggtcatcaaagaaaacttgaggttgtctggtccagttgataggttgttttctagagttactaccgaggatatcgttatggaaggtcatgttgttccaaagggtacttacattaacgttgatatcgcctccttgcatttcaatccaaattattggcatgacccacagtccttcattccagaaagatttgaagatgatggtgaacattctcatcatgctggtatgacttggttgccattctctaatggttctagacaatgtctgggtatgaacttctcattgactgaacaaagggttttcttggccatgttgttgaagagatacgttgttgatatctccaaggactccatccattacgataaggttgtttacgacaagttgttcaatttcgctccagcttctttgaccttgaactttactaagagacagtaa

SEQ ID NO: 278 - protein, 525 aa, Lichtheimia corymbifera JMRC:FSU:9682
MERLVNIYSDLSTQIVSKTPLGRQQKISIAAAVSLVVLYLARKAVTPPARLRHLPYVGLFTFLNAFMRRRLMSDLSSEVTLPAAMKSSSGLYTRFDQNGWSVHITRPESAKRFLLKTDIFAKADIGEVRGNTLFGKFLFQRNILMLNGHEWKAQRKVANPAFHRSMPVEMFAKLAQKTINVMDRAGSETINFHQMTERFALDVIGLAGFDFDFHAIEDPDSEWVVRYRDIMEASINPWFIIFYNLDMRYLFLFPGRKRMHRELDVFLGMMDEVIAHKRQVLKDQQSKVPQSERDLLTLMIEAENSGEGSMTNEELRNNLCLFFLAGHDTTANALAYAVYHLAKNPDMQRKAREEAIKVLGDEPQDVFPTLEQTREFPYINMIIKETLRITPPVAAIVSRETTQDTELEGQFIPKGTKTTVDIYELQHNPTVWQDPETFRPERFEPGGEAEQLAGSGMSWIPFSNGQRQCIGMNFSLAEQRVFLPMLLRKYEWHLPKDSIHKDKVQTVGFGIVKPRELMLTFKKRY

SEQ ID NO: 279 - DNA, 1578 bp, Lichtheimia corymbifera JMRC:FSU:9682
  source 1..1578: mol_type = other DNA
atggaaaggctggtcaacatctactctgatttgtctactcagatcgtttctaagactccattgggtagacaacagaagatttctattgctgctgctgtttctttggtcgtcttgtatttggctagaaaagctgttactccaccagctagattgagacatttgccatatgttggtttgttcaccttcttgaatgctttcatgcgtagaagattgatgtccgacttatcttctgaagttactttgccagctgctatgaagtcatcttctggtctatacactagattcgatcaaaacggttggtccgttcatattacaagaccagaatctgctaagaggttcttgttgaaaaccgatattttcgccaaggccgatattggtgaagttagaggtaatactttgttcggcaagtttttgttccagaggaacatcttgatgttgaacggtcatgaatggaaggctcaaagaaaagttgctaatccagctttccataggtctatgccagttgaaatgtttgctaagttggctcaaaagaccatcaacgttatggatagagctggttctgaaaccatcaacttccatcaaatgactgaaagattcgccttggatgttattggtttggctggttttgatttcgatttccatgctatcgaagatccagattctgaatgggttgttagatacagagatatcatggaagcctctattaacccatggttcattatcttctacaacctggacatgaggtacttgtttttgtttcctggtagaaagaggatgcacagagaattggatgttttcttgggtatgatggatgaagttatcgcccataagagacaagttttgaaggaccaacaatccaaggttccacaatctgaaagagatttgttgaccttgatgatcgaagctgaaaattctggtgaaggttctatgaccaatgaagagttgagaaacaacctgtgcttgttttttttggccggtcatgatacaactgctaatgctttggcttatgccgtttaccatttggctaagaatccagacatgcaaagaaaggctagagaagaagctattaaggttttgggtgatgaaccacaagatgttttcccaactttggaacagactagagaattcccttacatcaacatgatcatcaaagaaaccttgagaatcacaccaccagttgctgctatagtttcaagagaaactactcaagacaccgaattggaaggtcaattcattccaaaaggtactaagaccaccgttgacatctatgaattgcaacataatccaaccgtatggcaagacccagaaacttttaggccagaaagatttgaaccaggtggtgaagcagaacaattggcaggttctggtatgtcttggattccattttctaacggtcaaagacaatgcatcggtatgaatttctcattggctgaacaaagggttttcctgccaatgttgttgagaaagtatgaatggcatttgcccaaggattctatccacaaagataaggttcaaaccgttggtttcggtatcgttaagccaagagaattgatgctgactttcaagaagaggtactaa

SEQ ID NO: 280 - protein, 539 aa, Lichtheimia corymbifera JMRC:FSU:9682
MDQITSTVNTYVVPLFAGEQGKRLIQKHRTSIAAAVALVSTYAIFRSITQVPRQLKHLPYLGFFDYIKAVVAGKSVDDIAHELTLPAVKRSKSGLYVRFDKDGWTVHIVDPGAAKKFLLKTGYWYPLDIFPKTQNAIQEGLLIRHVIGPRHIVNLNGHEWKTHRKVANPAFHRSMPINIFGRVAEKLFKVMDNESQYGPIEIHNYTTRWTLDALGLAAFDFDFHAVEDKDNEWVSRYNTVMTSAFDIKYLVFPGLDTWLLPFNPSRKHKHAEADKLLGMIDQIILEKRKTLQNKPSTTSEKQDGEKDLLTMMIEAENSGEGVLTNEELRSNVVVFFIAGHDTTANSLATAIYELAVNQDVQTKARQEAIQTLGEAPENIVPTAEQAREMTYMNMIIKENLRIHPPAPGIGVRTTQQDTELAGTFIPKGTRVTVDIHEMHHNPDIWSNPEEFKPERFIPGGEADQLAGNGMSYLPFGNGARQCIGMNFSLTEQRVLLPMLLRKYEWHLPDDSIHKERLNTGGVSLVTSPKDLQIVFKRRY

SEQ ID NO: 281 - DNA, 1620 bp, Lichtheimia corymbifera JMRC:FSU:9682
  source 1..1620: mol_type = other DNA
atggaccaaatcacctctaccgttaacacttacgttgttccattattcgctggtgaacaaggtaagagattgatccaaaaacacagaacctctattgctgctgctgttgctttggtttctacttacgctattttcagatccatcactcaagtcccaagacaattgaaacatttgccatacttgggtttcttcgattacattaaggctgttgttgctggtaagtccgttgatgatattgctcatgaattgactttgccagccgttaagagatctaaatctggcttgtatgttaggttcgataaggatggttggaccgttcatatagttgatccaggtgctgctaagaagttcttgttgaaaactggttactggtatcccttggatatcttcccaaaaactcaaaacgctatccaagagggtttgttgatcagacatgttattggtccaagacacatcgttaacttgaatggtcatgaatggaaaacccatagaaaggttgctaatccagctttccatagatccatgccaatcaacatttttggtagagttgccgagaagttgttcaaggttatggataacgaatctcagtacggtccaatcgaaattcataactacactactagatggaccttggatgctttgggtttagctgcttttgatttcgatttccatgccgttgaagataaggacaatgaatgggtttctaggtacaacactgttatgacatctgccttcgacattaagtacttggtttttccaggtttggatacctggttgttgccttttaatccatccagaaaacataagcacgctgaagctgataagttgttgggtatgattgaccagatcatcttggaaaagagaaagaccttgcaaaacaagccatctactacctctgaaaagcaagatggtgaaaaggatttgctgaccatgatgattgaagctgaaaattctggtgaaggcgttttgactaacgaagaattgagatccaacgtcgtcgtttttttcattgctggtcatgataccaccgctaattctttggctactgctatctatgaattggccgttaatcaagacgttcaaactaaggctagacaagaagctattcaaactttgggtgaagctcctgaaaacatagttccaactgctgaacaagctagagaaatgacttacatgaacatgatcatcaaagagaacctgagaattcatccaccagctccaggtattggtgttagaactactcaacaagatactgagttggccggtacttttattccaaaaggtactagagttaccgtcgacattcacgaaatgcatcataatccagacatttggtctaacccagaagaattcaaaccagaaagattcattccaggtggtgaagcagatcaattggctggtaatggtatgtcttatttgccatttggtaacggtgctagacaatgtattggtatgaacttctcattgaccgaacaaagggttttgttgccaatgttgttgagaaagtacgaatggcatttgccagatgactccattcacaaagaaagattgaataccggtggtgtttctttggttacttctccaaaagacttgcagatcgtgtttaagagaaggtactga

SEQ ID NO: 282 - protein, 532 aa, Lichtheimia ramosa; identical to SEQ ID NO: 208

SEQ ID NO: 283 - DNA, 1599 bp, Lichtheimia ramosa; identical to SEQ ID NO: 209
  source 1..1599: mol_type = other DNA

SEQ ID NO: 284 - protein, 547 aa, Lichtheimia corymbifera JMRC:FSU:9682; identical to SEQ ID NO: 238

SEQ ID NO: 285 - DNA, 1644 bp, Lichtheimia corymbifera JMRC:FSU:9682; identical to SEQ ID NO: 239
  source 1..1644: mol_type = other DNA

SEQ ID NO: 286 - protein, 548 aa, Lichtheimia ramosa
MPIVSTLVQRANTWLLPRLQNIIHLYSTILIPHLRQRKAFIVPLVAVASMTLALYRFYRKISRPPASLSHLPYCDFWTTIKYYMGDGLVQDYSRQVILPTLTAGSGVFARFSAEGWIVDITDPVAAKQMLLKTGKYNFPKSETTMGVQGTLIERYVGGPNIVFLNGHDWKRHRKIANPAFHRAFPVKLFGALTQNMFKAVDDDNGRINVLDIFTRLTLDAIGTAGFGFNFNALGDKDNKWVAGYNSIREGMVKPLYIMMPIFDTKLVHLIPDRQKAHNNLTDFLNMLDTIIHEKREQIAAKKAADIEEHEKDLLTLMIESEMNPESEGAVMSNEELKSNLCIFFLAGHDTTAFTLSCAIYELAKNPDIQEKARQEVIRILGDESHDILPTVEQTKQMTYLNTIIKETLRLHNPLLTMTTRTAMEDCELGGVFIPKGTKIDVDIYNLHRNPRVWSNPDEFMPDRYAPGGEAERQPGSGLAWVPFSNGGRQCIGMNFSLAQQRVVLAMLLRKYTFELPKDTIHKEDIQKRGIIFGLITVEDLEIVFNRRY

SEQ ID NO: 287 - DNA, 1647 bp, Lichtheimia ramosa
  source 1..1647: mol_type = other DNA
atgcccatcgtttccactttggttcaaagagctaatacttggttgttgccaagattgcaaaacatcatccacttgtactccaccattttgatcccacatttgagacaaagaaaggccttcatagttccattggttgctgttgcttctatgactttggcactgtacagattctacagaaagatttctagaccaccagcctcattgtctcatttgccatattgtgatttctggacgaccatcaagtattacatgggtgatggtttggtccaagactactctagacaagttattttgccaactttgactgctggttctggtgtttttgctagattttctgctgaaggttggatcgttgatattactgatccagttgctgctaagcagatgttgttgaaaactggtaagtacaacttccccaagtctgaaactactatgggtgttcaaggtactttgatcgaaagatatgttggtggtccaaacatcgttttcttgaatggtcatgattggaagaggcatagaaagattgctaatccagctttccatagagctttcccagttaagttgtttggtgctttgactcaaaacatgttcaaggccgttgatgatgataacggtagaatcaacgttttggacatcttcactagattgaccttggatgctattggtacagctggttttggttttaactttaacgctttgggtgacaaggataacaaatgggttgctggttacaactccattagagaaggtatggttaagcccctgtatatcatgatgccaattttcgataccaagctggttcacttgattccagatagacaaaaggctcataacaacttgaccgacttcttgaatatgttggacaccattatccacgaaaagagagaacaaattgctgccaaaaaggctgccgatattgaagaacacgaaaaggatttgttgaccctgatgatcgaatctgaaatgaacccagaatctgaaggtgctgttatgtctaacgaagagttgaagtctaacctgtgtattttcttcttggctggtcatgacactactgcttttactttgtcttgtgccatctacgaattggctaagaacccagatatacaagaaaaggccagacaagaagtcatcagaattttgggtgatgaatcccatgatatcttgccaacagttgaacagactaagcaaatgacctacctgaacaccatcatcaaagaaaccttgagattgcacaaccccttgttgactatgactactagaactgctatggaagattgcgaattaggtggtgttttcattccaaagggtactaagatcgatgtggacatctataacttgcacagaaatccaagagtttggtctaacccagatgagtttatgccagatagatatgctccaggtggtgaagctgaaagacaaccaggttctggtttggcttgggttccattttctaatggtggtagacaatgtatcggcatgaatttctcattggctcaacaacgtgttgttttggctatgctgttgagaaagtacactttcgaattgccaaaggacactatccacaaagaagatattcagaagaggggtatcatcttcggtttgattactgtcgaagatttggagatcgtgttcaacagaagatactga

SEQ ID NO: 288 - protein, 514 aa, Lichtheimia ramosa
MTEIKEHIYRYRHYIGVAAAVALVCQQVYYRIFRIPKNLRHIPAIPYGQQLKALRSDEALTSRTKRLVFPLLSKCNGVYLNRMPFKWTIYVADPEIARAILFKPEFGHKTRSVTDSLDKNSSLFEFVGDDNIAIVNGHEWKEQRKIMNPAFHRATPVGMFGSLMPKVFRLVEEQPTLPALDLMQKLTLDALGKSVFGFEFGALDDPDSVWVKTYRQVFDSFTDVFSLVFPRLDPIYRYFSAKHREQYNAVYKLIDLLDGMADKKRSMLQDASNSDIKDVPDHEKDLLQLMLEAELRGEGSWTKRELRHNMAIFFVAGQDTTSHALTFCLYLLAKNQDIQKKAREEILNVFGDEPKDVFPTLEDCKKLNYLDMVIKESMRIYPPANDVLARDVNEDLNVKGVFIPKGSMVSVDIHALHHRPDLWHEPDKFNPDRFLPGGEHDSHVGVTYAPFSSGSRQCIALKFATMQQRVVLSMLLRKYEWELPKDSKHKDSIQFQIPFNIAPKDLELTFHKRY

SEQ ID NO: 289 - DNA, 1545 bp, Lichtheimia ramosa
  source 1..1545: mol_type = other DNA
atgaccgagatcaaagagcacatctacagatacagacattacattggtgttgctgctgctgttgctttggtttgtcaacaagtttactacaggattttcaggatcccaaagaacttgagacatattccagctattccatacggtcaacaattgaaggctttgagatctgatgaagccttgacttctagaactaagagattggttttccccttgctgtctaaatgtaacggtgtttacttgaacaggatgccattcaaatggactatctatgttgccgatccagaaattgctagagccattttgtttaagccagaattcggtcataagaccagatctgttactgattccttggacaagaactcctctttgtttgaattcgttggtgatgacaacattgccatcgttaatggtcatgaatggaaagaacagcgtaagattatgaacccagcttttcatagagctactccagttggtatgtttggttctttgatgccaaaggttttcaggttggttgaagaacaacctactttgccagctttggatttgatgcaaaagttgactttggatgctttgggcaagtctgtttttggttttgaatttggtgcattggatgatccagattccgtttgggttaagacttacagacaagttttcgattccttcaccgacgttttctcattggtttttccaagattggacccaatctacaggtacttctctgctaaacatagagaacagtacaacgccgtttacaagttgatcgatttgttggatggtatggccgacaagaaaagatcaatgttgcaagatgcttccaactccgatattaaggatgttccagatcacgaaaaggacttgttgcaattgatgttggaagctgaattgagaggtgaaggttcttggacaaaaagagaattgagacacaacatggccattttctttgttgctggtcaagatacaacttcccatgctttgactttttgcttgtacttgttggccaagaaccaggatattcaaaagaaggccagagaagaaatcctgaacgttttcggtgatgaacctaaagatgttttcccaactttggaggattgcaagaagttgaactacttggacatggtgatcaaagaatccatgagaatctatccaccagccaatgatgttttggctagagatgttaacgaagatttgaacgtcaagggtgttttcattccaaagggttctatggtttccgttgatattcatgccttgcatcatagacctgatttgtggcatgaaccagataagttcaatccagacagatttttgccaggtggtgaacatgattcacatgttggtgttacttacgctccattttcatctggttctagacaatgtattgctttgaagttcgctaccatgcaacaacgtgttgttttgtctatgctgttgagaaagtacgaatgggaattgccaaaagactctaagcacaaggattccatccaatttcaaatcccattcaatatcgcccctaaggatttggaattgaccttccataagaggtactaa

SEQ ID NO: 290 - protein, 522 aa, Rhizopus microsporus
MDHLIQVYNSSTQVLIPVLQKRSKASYITAAIALIIAQRLYSYFRVPKHLRGFPKLPYFGIAKSFFAKESPRERVKKYILPIINERDGFYISNIPFGWMLYVTNPIAAKQILLKSNGFPKNHGLLEDMGENLFIEFIGKDNVVLTNGDTWKRQRKVMNPAFHHSLPIKTMSNVVFSLISVIDQANGTVPVASTMQNFTLDTLGLAIFGFDFKALQGDGDEWTKTYRLVSDCLFDPIINVFSSYSFIFDRIYPRRRRGAMATRKLGEKFLEIAQQKRMEIKSGAFADVPDNEKDLLTLMLEAEEKGDVWTSEDELRHNIAVLFLAGHDTTAHALSFCFYHLAKNKDIQQKLRKEVLDLLGDEPVDVVPTVEQLKDMQYLNMVIKENLRMNSPADMLFSRDVQEDIVLANTFIPKGTVISINIEALHCNPKLWHNPDQFDPERFAPGGEHEQHEGMTWLPFSNGTRQCLGMNFSLFEQRLVIAMILKKYEISIPEDSIHRNHIINDMPFNVAPKSLELTFTKRY

SEQ ID NO: 291 - DNA, 1569 bp, Rhizopus microsporus
  source 1..1569: mol_type = other DNA
atggaccacttgatccaggtctacaactcttctactcaagttttgattccagtcttgcagaagagatctaaggcttcttatattaccgctgccattgctttgattattgcccaaagactgtactcctacttcagagttccaaaacatttgagaggtttcccaaagttgccatactttggtattgctaagtcattcttcgccaaagaatctccaagagaaagagtcaagaagtacatcttgccaatcatcaacgaaagagatggcttctacattagcaacattccatttggttggatgctgtacgttaccaatccaattgctgctaagcaaatcctgttgaagtctaacggttttccaaaaaaccacggtttgctagaagatatgggtgagaatttgttcatcgagttcatcggtaaggataacgttgttttgactaacggtgatacctggaagagacaaagaaaggttatgaatccagccttccatcattccttgcctattaagactatgtccaacgtcgttttctccttgatctccgttattgatcaagctaatggtactgttccagttgcttctactatgcaaaacttcaccttggatactttgggtttagccattttcggttttgactttaaggcattgcaaggtgatggtgatgaatggactaagacttacagattggtttccgattgcttgttcgacccaattatcaacgttttcagctcctactccttcatcttcgatagaatctacccaagacgtagaagaggtgctatggctactagaaaattgggtgaaaagttcttggaaatcgcccagcaaaaaaggatggaaatcaaatctggtgctttcgctgatgttccagataacgaaaaagatctgttgaccttgatgttggaagctgaagaaaaaggtgatgtctggacttctgaagatgaattgagacataacattgccgttttgttcttggctggtcatgatacaactgctcatgctttgtctttctgcttttaccatttggctaagaacaaggacatccagcagaagttgagaaaagaagttttggatttgttgggtgatgaaccagttgatgttgttccaactgttgaacaattgaaggacatgcagtacttgaacatggtcatcaaagaaaacctgaggatgaattctccagccgatatgttgttttccagagatgttcaagaggatatcgttttggctaacacctttattccaaagggtactgtcatctccattaacattgaagccttgcattgcaatccaaagttgtggcataatccagatcaattcgatccagaaagatttgctccaggtggtgaacatgaacaacatgaaggtatgacttggttgccattttctaacggtactagacaatgtctgggtatgaacttcagcttgtttgaacagagattggttatcgccatgatcttgaagaagtacgaaatctccattccagaggattccatccatagaaaccacatcattaacgacatgccattcaatgttgctcccaagtctttggaattgactttcactaagaggtactaa

SEQ ID NO: 292 - protein, 687 aa, Helicoverpa armigera
MSDSAQDVLKDAATGAAAAAAAGGSLFSTFDIIVLVILLGGTIWWLYNSKKENKKDEILLSKYSIQAAGSIQVTENSFINKLKSSGRSLVVFYGSQTGTGEEFAGRLAKEGIRYKMKGMVADPEECDMEELMKLQDIPNSLAVFCMATYGEGDPTDNSMEFYEWLKNGEPDLTGLNYAVFGLGNKTYEHYNAVAIYLDKRLEELGATRVYELGLGDDDANIEDDFITWKDKFWPAVCEKFNIESTGEEELIRQFRLVTHAPGDIQPNNVFTGEIARLHSLQVQRPPYDAKNPFLAQITVNRELHKGGDRSCIHVELDISDSKMRYEAGDHVAVYPINDTNLVERLGQLTGANLDEIFSLINTDQESSKKHPFPCPTSYRTALSHYVEITALPRTHILRELVEYCSDEEDKKKLMLMATNSQEGKALYQSFIVDACRNIVHILEDIPSCKPPLDHLCELLPRLQPRYYSISSSPKMYPETVHITAVIVKYKTPTGRVNKGVTTTWLAENKPEPGKPLPRVPVYIRKSQFRLPLQTQTPIIMVGPGTGLAPFRGFLQERAFARANGKEVGESVLYFGCRHRDQDYIYQDELEKYEQNGDVKLNLAFSRDQKEKVYVTHLLEKDMDLLWDVIGNRNGHFYICGDAKNMAVDVRNIVLKAIQEKGGRTESEAVQFIKKLESMKKYSADVWS

SEQ ID NO: 293 - DNA, 2064 bp, Helicoverpa armigera
  source 1..2064: mol_type = other DNA
atgtccgattccgctcaagatgttttgaaagatgctgctactggtgctgctgctgcagctgccgctggtggttctttgttttctacttttgatatcatcgtcctggtcatcttgttaggtggtactatttggtggctgtacaactccaaaaaagagaacaagaaggacgagatcctgctgtctaaatactctattcaagctgccggttccattcaagttactgaaaactctttcatcaacaagctgaagtcctctggtagatctttggttgttttttacggttctcaaaccggtactggtgaagaatttgctggtagattggctaaagaaggtatcaggtacaaaatgaagggtatggttgctgatcctgaagaatgtgatatggaagagttgatgaagttgcaggatatcccaaattcattggctgttttctgtatggctacttacggtgaaggtgatccaactgataatagcatggaattctacgagtggttgaagaatggtgaaccagatttgactggtttgaactacgctgtttttggtttgggtaacaagacctacgaacattacaatgctgttgctatctacttggacaagaggttggaagaattgggtgctactagagtttacgaattaggtttgggtgatgatgatgccaacatcgaagatgatttcattacctggaaggataagttttggccagctgtttgtgaaaagttcaacattgaatctaccggcgaagaagaattgatcagacaattcagattggttactcatgccccaggtgatattcaacctaacaatgttttcactggtgaaatcgccagattgcactctttacaagttcaaagaccaccatacgatgctaagaatccattcttggctcaaatcaccgttaacagggaattgcacaaaggtggtgatagatcttgcatccatgttgaattggatatctccgactctaagatgagatatgaagctggtgatcatgttgctgtttacccaatcaatgataccaacttggttgaaagattgggtcaactaactggtgctaatttggacgaaatcttctccttgattaacaccgaccaagagtcctctaagaaacatccatttccatgtccaacatcttacagaactgctttgtctcactacgttgaaattactgctttgccaagaacgcatatcttgagagaattggttgaatactgctctgatgaagaggacaagaaaaagttgatgttgatggctaccaacagccaagaaggtaaagccttgtatcaatcctttatcgttgatgcctgtagaaacatcgttcacatcttggaagatatcccatcttgtaaaccaccattggatcatttgtgcgaattgctaccaagattgcagccaagatattactccatttcctcctctccaaaaatgtacccagaaaccgttcatattaccgccgttatcgttaagtacaaaactccaactggtagagttaacaagggtgttactactacttggttggctgaaaacaaaccagaaccaggtaaaccattgccaagagttccagtttacattaggaagtctcagttcagattgccattgcaaactcaaaccccaattatcatggttggtccaggtactggtttggctccttttagaggttttttacaagaaagagctttcgctagagccaacggtaaagaagttggagaatctgtcttgtacttcggttgtagacatagagatcaagactacatctaccaagacgaattggaaaagtacgaacaaaacggtgatgtgaagttgaacttggccttttccagagatcaaaaagaaaaggtttacgtcacccacttgttggaaaaggatatggatttgttgtgggatgtcatcggtaatagaaacggtcatttctacatttgcggtgacgctaagaatatggctgttgatgttagaaacattgtcctgaaggccattcaagagaaaggtggtagaactgaatctgaagctgttcagttcatcaaaaagttggagtccatgaagaaatactccgctgatgtttggtcttaa

SEQ ID NO: 294 - protein, 689 aa, Spodoptera exigua
MSDSAQDVLKDAVTGAAAAAADAADGSLFSTFDIIVLVILLGGTIWWLYNSKKENKKDETLLSKYSIQAAGSIQVTENSFINKLKSSGRSLVVFYGSQTGTGEEFAGRLAKEGIRYKMKGMVADPEECDMEELMKLQEIPNSLAVFCMATYGEGDPTDNSMEFYEWIKNGEPDLSGLNYAVFGLGNKTYEHYNAVAIYLDRRLEELGATRVFELGLGDDDANIEDDFITWKEKFWPAVCEKFNIESTGEEELIRQFRLVTHGPDDIQPNNIFTGEIARLHSLQVQRPPYDAKNPFLAQITVNRELHKGGDRSCIHVELDISDSKMRYEAGDHVAVYPINDSNLVERLGQLTGANLDEIFSLINTDQESSKKHPFPCPTIYRTALSHYVEITALPRTHILRELVEYCADEEDKKKLMLMATNSQEGKAMYQSFVVEACRNIVHILEDVPSCKPPLDHLCELLPRLQPRYYSISSSPKMYPETVHITAVVVQYKTPTGRINKGVTTTWLADNKPEPGKPLPRVPVFIRKSQFRLPLQSQTPIIMVGPGTGLAPFRGFLQERAFARANGKEVGENVLYFGCRHRDQDYIYQEELEKYEQNGDVKLNLAFSRDQKEKVYVTHLLEKDMDLLWDVIGNRNGHFYICGDAKNMAVDVRNIVLKTIQLKGGRTEAEAAQFIKKLESMKKYSADVWS

SEQ ID NO: 295 - DNA, 2070 bp, Spodoptera exigua
  source 1..2070: mol_type = other DNA
atgtccgattccgctcaagatgttttgaaggatgctgttactggtgctgcagctgctgctgccgatgctgctgatggttctttgttttctactttcgatatcatcgtcctggtcatcttgttaggtggtactatttggtggctgtacaactccaaaaaagagaacaaaaaggacgaaaccctgctgtccaaatactctattcaagctgctggttccattcaggttactgaaaactctttcatcaacaagttgaagtcctccggtagatctttggttgttttttacggttctcaaaccggtactggtgaagaatttgctggtagattggctaaagaaggtatcaggtacaaaatgaagggtatggttgctgatcctgaagaatgtgatatggaagagttgatgaagttgcaagagatcccaaattcattggctgttttctgtatggctacttacggtgaaggtgatccaactgataatagcatggaattctacgagtggatcaagaatggtgaaccagatttgtctggtttgaactacgctgtttttggtttgggtaacaagacctacgaacattacaatgctgttgccatctacttggacagaagattggaagaattgggtgctactagagttttcgaattaggtttgggtgatgatgatgccaacatcgaagatgatttcattacctggaaagagaagttttggccagctgtttgtgaaaagttcaacattgaatctaccggcgaagaagaattgatcagacaattcagattggttacccatggtccagatgatattcagccaaacaatatcttcactggtgaaatcgctagattgcactcattgcaagttcaaagaccaccatacgatgctaagaatccattcttggctcaaatcaccgttaacagggaattgcacaaaggtggtgatagatcttgcatccatgttgaattggatatctccgactctaagatgagatatgaagctggtgatcatgttgctgtttacccaatcaatgattccaacttggttgaaagattgggtcaactaactggtgctaatttggacgaaatcttctccttgattaacaccgaccaagagtcctctaagaaacatccatttccatgtccaactatctacagaactgctttgtctcactacgttgaaattactgctttgccaagaacgcatatcttgagagaattggttgaatactgcgctgacgaagaggataagaaaaagttgatgttgatggccactaactcccaagagggtaaagctatgtatcaatcctttgttgttgaagcctgcagaaacatcgttcacattttggaagatgttccatcttgcaaaccaccattggatcatttgtgtgaattgctaccaagattgcaacctaggtactactccatttcttcctctccaaaaatgtacccagaaaccgttcatattaccgctgttgttgttcagtacaaaactccaactggtagaatcaacaagggtgttactactacttggttggctgataacaaaccagaaccaggtaaaccattgccaagagttccagttttcattaggaagtctcagttcagattgccattgcaatcacaaaccccaattatcatggttggtccaggtactggtttggctccttttagaggttttttacaagaaagagctttcgctagagccaacggtaaagaagttggagaaaacgtcttgtacttcggttgtagacatagagatcaagactacatctaccaagaggaattggaaaagtacgaacaaaacggtgatgtgaagttgaacttggccttttccagagatcaaaaagaaaaggtttacgtcacccacttgttggaaaaggatatggatttgttgtgggatgtcatcggtaatagaaacggtcatttctacatttgcggtgacgctaagaatatggctgttgatgttagaaacattgtcctgaaaaccatccagttgaaaggtggtagaactgaagctgaagctgctcaattcatcaagaaattggagtccatgaagaagtactctgctgacgtttggtcttga

SEQ ID NO: 296 - protein, 687 aa, Bombyx mori
MSENAQDLLKDAAAGAAAAAAAGGSLFSTFDIIVLALLLGGTIWWFYNSKKESKRDKILLEKYSIQAAGSIQVTENSFITKLKTSGRSLVVFYGSQTGTAEEFAGRLAKEGMRYKMKGMVADPEECDMEELTKLQEIENSLAVFCMATYGEGDPTDNSMEFYEWLKNQDPDLTGLNYAVFGLGNKTYEHYNAVAIYLDKRLEELGATRVYELGMGDDDANIEDDFITWKDKFWPAVCEKYNIESAGEEELTRQFRHVLHPPDEVSPNSVFTGEIAKLHSLQVQRPPYDSKNPFLAQITVNRELHRGGDRSCLHVELDISDSKMRYEAGDHVAVYPINDMDLVERLGQLTNANLDEIFSLINTDQESSKKHPFPCPTSYRTALSHYVEITALPRTHILRELVEYCSNEEDKKKLLLMATNTQEGKSLYQSFVVDACRNIVHILEDLPSCKPPLDHICELLPRLQPRYYSISSSPKLHPETVHITAVVVKYKTPTGRINKGVATTWLAQHKPEPGKPLPRVPVYIRKSQFRLPMQTQTPIIMVGPGTGLAPFRGFLQDRAFVRASGKEVGENILYFGCRHRDEDYIYQEELEEYEKNGDVKLNLAFSRDQANKVYVTHLLENNMDELWDVIGNRNGNFYICGDAKNMAVDVRNIVLKAIKEKGGRTETEAVQFLKKLESVKKYSSDVWS

SEQ ID NO: 297 - DNA, 2064 bp, Bombyx mori
  source 1..2064: mol_type = other DNA
atgtccgaaaacgcccaagatttgttgaaagatgctgctgctggtgctgcagctgctgccgctgccggtggttctttgttttctacttttgatattatcgtcctggccttgttgttaggtggtactatttggtggttttacaactccaagaaagagtccaagagggacaagattttgttggagaagtactctattcaagccgccggttcaattcaagttactgaaaattctttcattaccaagctgaaaacctccggtagatctttggttgttttttacggttctcaaaccggtactgctgaagaatttgctggtagattggctaaagaaggtatgaggtacaaaatgaagggtatggttgctgatcctgaagaatgtgatatggaagaattgaccaagttgcaagagatcgaaaactcattggctgttttctgtatggctacttatggtgaaggtgatccaactgataactccatggaattttacgagtggttgaagaatcaagatccagatttgactggtttgaactacgctgtttttggtttgggtaacaagacctacgaacattacaatgctgttgctatctacttggacaagagattggaagaactaggtgctactagagtctacgaattaggtatgggtgatgatgatgccaacatcgaagatgatttcattacttggaaggacaagttttggccagctgtttgtgaaaagtacaacattgaatctgccggtgaagaagaactgactagacaattcagacatgttttacacccaccagatgaagtttctccaaactctgttttcactggtgaaatcgctaagttgcactcattgcaagttcaaagaccaccatacgattctaagaatccattcttggctcaaatcaccgtcaacagagaattgcatagaggtggtgatagatcttgcttgcatgttgaattggatatctccgactctaagatgagatatgaagctggtgatcatgttgctgtttacccaatcaatgatatggacttggtagaaagattgggtcagttgactaatgctaacttggacgaaatcttctccttgatcaacaccgatcaagagtcctctaagaaacatccatttccatgtccaacctcttacagaactgctttgtctcattacgttgaaattaccgctttgccaagaactcacatcttgagagaattggttgaatactgctctaacgaagaggacaagaaaaagttgttgttgatggctaccaacactcaagaaggcaagtcattataccagtcctttgttgtagatgcctgcagaaacatcgttcatatcttggaagatttgccatcttgtaagccaccattggatcatatttgcgaattgctaccaagattgcaacctaggtactactccatttcttcctctccaaaattgcatccagaaaccgttcacattactgccgttgttgttaagtacaaaactccaactggtaggatcaacaaaggtgttgctactacatggttggctcaacataagccagaaccaggtaaaccattgccaagagttccagtttacattaggaagtcccaattcagattgccaatgcaaactcaaaccccaattatcatggttggtccaggtactggtttggctccttttagaggttttttacaagatagagctttcgtcagagcctccggtaaagaagttggagaaaacatcttgtacttcggttgcagacatagggatgaagattacatctatcaagaggaattggaagagtacgaaaagaacggtgatgtcaagttgaatttggccttctcaagagatcaagccaacaaggtttatgttactcacctgttggaaaacaacatggatgaattgtgggatgtcatcggtaatagaaacggtaacttctacatttgcggtgacgctaagaatatggctgttgatgttagaaacattgtcctgaaggccatcaaagaaaaaggtggtagaactgaaactgaagccgttcaatttttgaagaagctggaatccgtcaaaaagtactcttctgatgtttggtcctaa

SEQ ID NO: 298 - protein, 687 aa, Bombyx mandarina
MSENAQDLLKDAAAGAAAAAAAGGSLFSTFDIIVLALLLGGTIWWFYNSKKESKRDKILLEKYSIQAAGSIQVTENSFITKLKTSGRSLVVFYGSQTGTAEEFAGRLAKEGMRYKMKGMVADPEECDMEELTKLQEIENSLAVFCMATYGEGDPTDNSMEFYEWLKNQDPDLTGLNYAVFGLGNKTYEHYNAVAIYLDKRLEELGATRVYELGMGDDDANIEDDFITWKDKFWPAVCEKYNIESAGEEELTRQFRHVLHPPDEISPNSVFTGEIAKLHSLQVQRPPYDSKNPFLAQITVNRELHRGGDRSCLHVELDISDSKMRYEAGDHVAVYPINDMDLVERLGQLTNANLDEIFSLINTDQESSKKHPFPCPTSYRTALSHYVEITALPRTHILRELVEYCSNEEDKKKLLLMATNTQEGKSLYQSFVVDACRNIVHILEDLPSCKPPLDHICELLPRLQPRYYSISSSPKHHPETVHITAVVVKYKTPTGRINKGVATTWLAQHKPEPGKPLPRVPVYIRKSQFRLPMQTQTPIIMVGPGTGLAPFRGFLQDRAFVRASGKEVGENILYFGCRHRDEDYIYQEELEEYEKNGDVKLNLAFSRDQANKVYVTHLLENNMDELWDVIGNRNGNFYICGDAKNMAVDVRNIVLKAIKEKGGRTETDAVQFLKKLESVKKYSSDVWS

SEQ ID NO: 299 - DNA, 2064 bp, Bombyx mandarina
  source 1..2064: mol_type = other DNA
atgtccgaaaacgcccaagatttgttgaaagatgctgctgctggtgctgcagctgctgccgctgccggtggttctttgttttctacttttgatattatcgtcctggccttgttgttaggtggtactatttggtggttttacaactccaagaaagagtccaagagggacaagattttgttggagaagtactctattcaagccgccggttcaattcaagttactgaaaattctttcattaccaagctgaaaacctccggtagatctttggttgttttttacggttctcaaaccggtactgctgaagaatttgctggtagattggctaaagaaggtatgaggtacaaaatgaagggtatggttgctgatcctgaagaatgtgatatggaagaattgaccaagttgcaagagatcgaaaactcattggctgttttctgtatggctacttatggtgaaggtgatccaactgataactccatggaattttacgagtggttgaagaatcaagatccagatttgactggtttgaactacgctgtttttggtttgggtaacaagacctacgaacattacaatgctgttgctatctacttggacaagagattggaagaactaggtgctactagagtctacgaattaggtatgggtgatgatgatgccaacatcgaagatgatttcattacttggaaggacaagttttggccagctgtttgtgaaaagtacaacattgaatctgccggtgaagaagaactgactagacaattcagacatgttttacatccaccagacgaaatctctccaaactctgtttttactggtgaaatcgctaagttgcactccttgcaagttcaaagaccaccatacgattctaagaatccattcttggctcaaatcaccgtcaacagagaattgcatagaggtggtgatagatcttgcttgcatgttgaattggatatctccgactctaagatgagatatgaagctggtgatcatgttgctgtttacccaatcaatgatatggacttggtagaaagattgggtcagttgactaatgctaacttggatgagatcttctccttgatcaacaccgatcaagagtcctctaagaaacatccatttccatgtccaacctcttacagaactgctttgtctcattacgttgaaattaccgctttgccaagaactcacatcttgagagaattggttgaatactgctctaacgaagaggacaagaaaaagttgttgttgatggctaccaacactcaagaaggcaagtcattataccagtcctttgttgtagatgcctgcagaaacatcgttcatatcttggaagatttgccatcttgtaagccaccattggatcatatttgcgaattgctaccaagattgcaacctaggtactactccatttcttcctctccaaaacatcatccagaaaccgttcacattactgccgttgttgttaagtacaaaactccaactggtaggatcaacaaaggtgttgctactacatggttggctcaacataagccagaaccaggtaaaccattgccaagagttccagtttacattaggaagtcccaattcagattgccaatgcaaactcaaaccccaattatcatggttggtccaggtactggtttggctccttttagaggttttttacaagatagagctttcgtcagagcctccggtaaagaagttggagaaaacatcttgtacttcggttgcagacatagggatgaagattacatctatcaagaggaattggaagagtacgaaaagaacggtgatgtcaagttgaatttggccttctcaagagatcaagccaacaaggtttatgttactcacctgttggaaaacaacatggatgaattgtgggatgtcatcggtaatagaaacggtaacttctacatttgcggtgacgctaagaatatggctgttgatgttagaaacattgtcctgaaggccatcaaagaaaaaggtggtagaactgaaactgatgccgttcaatttttgaagaagctggaatccgtcaaaaagtactcttctgatgtttggtcctaa

SEQ ID NO: 300 - protein, 686 aa, Zygaena filipendulae
MTENSQDFLMDAATVTAAAAAGGTFFTTFDYIILAVLLGAAIWWLYSSKKENKKDEILLNQYSIQPASPIQLTENSFIKKLKSSGRSLVVFYGSQTGTGEEFAGRLAKEGIRYRLKGMVADPEECDMEELTKLKEIPNSLAVFCLATYGEGDPTDNCVDFYDWVRNSDPDLTGLNYAVFGLGNKTYEHYNAVAIVMDKRLEELGASRVCELGLGDDDANIEDDFITWKDKFWPAVCEKFNIENTGEEELTRQFNLVTYAPGEIETNKIYTGEIARLHSLQIQRPPYDAKNPFLAQIKVNKELHKGGDRSCLHVEFDISDSKMRYETGDHIGVYPINSMELVERLGQLTDTDIDEVFSLINTDQESTKKNPFPCPTSYRTALSHYVEITALPRTHILRELAEYCSDEEDKKMLILMATNSQEGKALYHSYVVDACRNIIHILEDIKSCKPALNHLCELLPRLQPRYYSISSSPKLYPDTVHITAVVVQYETPTGRINNGVTTTWLANLKPEVGKSLPKVPVYIRKSQFRLPLQTQTPIVMVGPGTGLAPFRGFIQERAHARANGKEAGENILYFGCRSREHDYIYREELEEYEKNGDVQLNLAFSRDQKQKVYVTHLLEKKMDQLWDVIGTKNGHFYVCGDAKNMAVDVRNILLKAFQEKGGKTEAEAQQFLKKLESMKKYSADVWS

SEQ ID NO: 301 - DNA, 2061 bp, Zygaena filipendulae
  source 1..2061: mol_type = other DNA
atgaccgaaaactcccaggatttcttgatggatgctgctactgttacagctgctgctgccgctggtggtactttttttactactttcgattacatcatcctggccgttttgttgggtgctgctatttggtggttgtactcttctaagaaagagaacaagaaggacgagatcttgttgaaccagtactctattcaaccagcctctccaattcaattgactgagaactctttcatcaagaagttgaagtcctctggtagatccttggttgttttttacggttctcaaactggtactggtgaagaatttgctggtagattggctaaagaaggtatcaggtataggttgaaaggtatggttgctgatcctgaagaatgcgatatggaagaattgaccaagttgaaagagatcccaaactctttggctgttttctgtttggctacttatggtgaaggtgatccaactgataactgcgttgatttttacgattgggtcagaaactctgatccagatttgactggtttgaactacgctgtttttggtttgggtaacaagacctacgaacattacaatgctgttgctatcgttatggacaagagattggaagaactaggtgcttctagagtttgcgaattaggtttgggtgatgatgatgccaatatcgaagatgatttcattacctggaaggacaaattttggccagctgtttgtgaaaagttcaacattgaaaacaccggtgaagaagagttgaccagacaattcaacttagttacttatgccccaggtgaaatcgagactaacaaaatctacactggtgaaattgccaggttgcactcattgcaaattcaaagaccaccatacgatgctaagaatccatttttggctcaaatcaaggtcaacaaagaattgcacaaaggtggtgatagatcctgcttgcatgttgaattcgatatctccgattccaagatgagatacgaaaccggtgatcatattggtgtttacccaatcaactccatggaattggttgaaagattgggccaattgaccgataccgatattgatgaagttttctccttgatcaacaccgatcaagaatccactaagaaaaacccatttccatgtccaacctcttacagaactgctttgtctcattacgttgaaattaccgctttgccaagaactcacatcttgagagaattggctgaatactgttctgatgaagaggacaaaaagatgttgattttgatggccaccaacagccaagaaggtaaagccttgtatcattcctatgttgttgatgcctgcagaaacatcatccatatcttggaagatatcaagtcttgcaagccagctttgaatcatttgtgcgaattattgccaagattgcagccaaggtactactccatttcttcatctccaaagttgtacccagataccgttcatattactgccgttgttgttcaatacgaaactccaactggtagaatcaacaacggtgttactactacttggttggctaatttgaaaccagaagtcggtaaatccttgccaaaagttccagtttacatccgtaagtcccaattcagattgccattgcaaacacaaactccaattgtcatggttggtccaggtactggtttggctccttttagaggttttattcaagaaagggctcatgctagagctaacggtaaagaagctggcgaaaacatcttgtactttggttgtagatccagagaacacgactacatctatagagaagaattggaggaatacgagaagaacggtgatgttcagttgaatttggccttctccagagatcaaaagcaaaaggtttacgttacccacttgttggagaaaaagatggatcaattgtgggatgtcatcggtactaagaatggtcatttctacgtttgtggtgacgctaagaatatggctgttgatgtcagaaacattctgctgaaggctttccaagaaaaaggtggtaaaactgaagctgaagcccaacagtttttgaaaaagttggagtccatgaagaagtactctgctgacgtttggtcttga

SEQ ID NO: 302 - protein, 681 aa, Cnaphalocrocis medinalis
MSDNAKDVLQDAAAAAGGSLFSTFDIVMLVVLLGAAVWWLYSSRKENKKDEIVLSKYSIQTAGSIQVTENSFIKKLKSSGRSLVVFYGSQTGTGEEFAGRLAKEGVRYKMKGMVADPEECDMEELTKLKEIPNSLAVFCMATYGEGDPTDNAMEFYEWLKNGEPDLTGLNYAVFGLGNKTYEHYNAVAIYLDKRLEELGATQVFELGLGDDDANIEDDFITWKDRFWPAVCEKYNIENTGEEELTRQFSLVTHAPDEIPSANVFTGEIARLHTYQVQRPPYDAKNPFLAQIAVNRELHKGGDRSCLHIELDISDSKMRYEAGDHVAVYPINDSNLVERLGNLTDSNLDEVFSLINTDQESSKKHPFPCPTSYRTALSHYLEITALPRTHIMRELAEYCSDEEDKKKLLLMATNSQEGKALYQSFVVDACRNIVHILEDIKSCKPPLDHLCELLPGLQPRYYSISSSPKMHPETVHVTAVVVQYKTPTGRVNKGVATTWLAQHKPVPGQPLPRVPVYIRKSQFRLPLQAQTPIIMVGPGTGLAPFRGFLQERAHARASGKEVGENVLYFGCRHRDQDYIYHEELEEFEKNGDVILNVAFSRDQAQKVYVTHLLEKNLDKVWDILGNRNGHFYVCGDAKNMAIDVRNLVLKAIKEKGGKTEAEAVQFLKKLDSMKKYSSDVWS

SEQ ID NO: 303 - DNA, 2046 bp, Cnaphalocrocis medinalis
  source 1..2046: mol_type = other DNA
atgtccgataacgctaaggatgtgttgcaagatgctgctgctgcagctggtggttctttgttttctacttttgatatcgtcatgctggtcgttttgttgggtgctgctgtttggtggttgtattcttctagaaaagagaacaagaaggacgagatcgtcttgtccaaatactctattcaaaccgccggttctattcaggttactgaaaactctttcatcaagaagttgaagtcctccggtagatctttggttgttttttacggttctcaaaccggtactggtgaagaatttgctggtagattggctaaagaaggtgtcagatacaaaatgaagggtatggttgctgatcctgaagaatgtgatatggaagaactgaccaagttgaaagagatcccaaattcattggctgttttctgtatggctacttacggtgaaggtgatccaactgataatgctatggaattctacgagtggttgaagaatggtgaaccagatttgactggtttgaactacgctgtttttggtttgggtaacaagacctacgaacattacaatgctgttgctatctacctggacaagagattggaagaattgggtgctactcaagttttcgaattaggtttgggtgatgatgatgccaacatcgaagatgatttcattacctggaaggatagattttggccagctgtttgtgaaaagtacaacattgaaaacaccggtgaagaagaattgaccagacaattctctttggttactcatgctccagacgaaattccatctgctaatgttttcactggtgaaatcgctagattgcacacttatcaagttcaaagaccaccatacgatgctaagaatccattcttggctcaaattgccgttaacagggaattgcacaaaggtggtgatagatcttgcttgcatatcgaattggatatctccgactctaagatgagatatgaagctggtgatcatgttgctgtttacccaatcaatgattccaacttggttgaaaggttgggtaacttgactgactctaacttggatgaggttttctccttgattaacaccgaccaagagtcctctaagaaacatccatttccatgtccaacctcttacagaactgctttgtctcattacttggaaattaccgctttgccaagaactcacatcatgagagaattggctgaatactgctctgacgaagaggataagaaaaagttgttgttgatggccaccaactctcaagaaggtaaagccttgtatcaatcctttgttgtcgatgcttgtagaaacatcgttcatatcttggaggatatcaagtcttgtaagccaccattggatcatttgtgcgaattattgccaggtctgcaacctagatattactccatttcttcctctccaaaaatgcacccagaaactgttcatgttactgctgttgttgttcagtacaaaactccaactggtagagttaacaaaggtgttgctactacttggttggctcaacataagccagttccaggtcaaccattgccaagagttccagtttacattagaaagtcccaattcagattgccattgcaagctcaaactccaattatcatggttggtccaggtactggtttggctccttttagaggttttttacaagaaagggctcatgctagagcttccggtaaagaagttggagaaaacgtcttgtatttcggttgtagacacagagatcaagactacatctaccatgaagagttggaggaatttgaaaagaacggtgatgttatcttgaacgtcgctttctctagggatcaagcacaaaaagtttacgttacccacttgttggaaaagaacttggacaaggtttgggatattttgggtaatagaaacggtcacttctacgtttgtggtgatgctaaaaacatggccatcgatgttagaaacttggttttgaaggccatcaaagaaaaaggtggtaagactgaagctgaagccgttcaatttttgaagaaactggactcgatgaagaagtactcttctgacgtttggtcttaa

SEQ ID NO: 304 - DNA, 2064 bp, Helicoverpa armigera; identical to SEQ ID NO: 293
  source 1..2064: mol_type = other DNA

SEQ ID NO: 305 - protein, 710 aa, Cunninghamella elegans
MAQQTPAVIDTLDLILLGSIGLGTIAWFTRRQLSERLFGTGQSNATPKPTTPQAPKRERNFVKVMEQQGRKVIFFYGSQTGTAEDFASRLAKQCSQKYGVSCMTADIEMYDLSYLDTLSEDSLVCFVMATYGEGEPTDNAVDFWEQFITDESPVFSEGGETLENLRYLMFGLGNKTYEHYNAVARILDKKLTGLGAKRIGERGEGDDDGSLEEDFLAWQESMWPTFCDALGVDENNAQQGPRQASYSVDELKEEYKNDDVYFGELGTKSKDSSRVVYDAKRPYNAPITTRELFNSSERHCLHVDIDISGTNLSYQTGDHVAMWPTNNEDEVLRLANILGLQDKLDNVISVKAIDPAAPKQHPFPVPTTYRAIFRHYIDICAPASRQSLMSFVEFAPTDSAKDLLKLLATDKDEYRLKVGEAVRNLGEVLELVSGNDKDTQPGSFTSVPFDLIVETIPRLQPRYYSISSSSKENSSIISATCVTLAYQPDPTPDRTVYGVNTNFLYRIHTQSSDNDIQGLPKYDLAGPRKAFLNEQGQSHKLPIHIRRSQFKLPRNTSCPVIMIGPGTGVAPFRGFVRERALQKKEGKSVGPTVLFFGNRHSEHDFLYSDEWPELFNTLGDDSKLITAFSRETEHKVYVQHRLEENGKDIWQLLEKGAYIYVCGDARNMARDVNQTFVNLAMEYGEKTEQKALDYVKSLRNTGRYQEDVWS

SEQ ID NO: 306 - DNA, 2133 bp, Cunninghamella elegans
  source 1..2133: mol_type = other DNA
atggctcaacaaactccagctgttattgatactttggatttgattttgttgggttctattggtttgggtactattgcttggtttactagaagacaattgtctgaaagattgtttggtactggtcaatctaatgctactccaaaaccaactactccacaagctccaaaaagagaaagaaattttgttaaagttatggaacaacaaggtagaaaagttatttttttttatggttctcaaactggtactgctgaagattttgcttctagattggctaaacaatgttctcaaaaatatggtgtttcttgtatgactgctgatattgaaatgtatgatttgtcttatttggatactttgtctgaagattctttggtttgttttgttatggctacttatggtgaaggtgaaccaactgataatgctgttgatttttgggaacaatttattactgatgaatctccagttttttctgaaggtggtgaaactttggaaaatttgagatatttgatgtttggtttgggtaataaaacttatgaacattataatgctgttgctagaattttggataaaaaattgactggtttgggtgctaaaagaattggtgaaagaggtgaaggtgatgatgatggttctttggaagaagattttttggcttggcaagaatctatgtggccaactttttgtgatgctttgggtgttgatgaaaataatgctcaacaaggtccaagacaagcatcttattctgttgatgaattgaaagaagaatataaaaatgatgatgtttattttggtgaattgggtactaaatctaaagattcttctagagttgtttatgatgctaaaagaccatataatgctccaattactactagagaattgtttaattcttctgaaagacattgtttgcatgttgatattgatatttctggtactaatttgtcttatcaaactggtgatcatgttgctatgtggccaactaataatgaagatgaagttttgagattggctaatattttgggtttgcaagataaattggataatgttatttctgttaaagctattgatccagctgctccaaaacaacatccatttccagttccaactacttatagagctatttttagacattatattgatatttgtgctccagcttctagacaatctttgatgtcttttgttgaatttgctccaactgattctgctaaagatttgttgaaattgttggctactgataaagatgaatatagattgaaagttggtgaagctgttagaaatttgggtgaagttttggaattggtttctggtaatgataaagatactcaaccaggttcttttacttctgttccatttgatttgattgttgaaactattccaagattgcaaccaagatattattctatttcttcttcttctaaagaaaattcttctattatttctgctacttgtgttactttggcttatcaaccagatccaactccagatagaactgtttatggtgttaatactaattttttgtatagaatccatactcaatcttctgataatgatattcaaggtttgccaaaatatgatttggctggtccaagaaaagcatttttgaatgaacaaggtcaatctcataaattgccaattcatattagaagatctcaatttaaattgccaagaaatacttcttgtccagttattatgattggtccaggtactggtgttgctccatttagaggttttgttagagaaagagctttgcaaaaaaaagaaggtaaatctgttggtccaactgttttgttttttggtaatagacattctgaacatgattttttgtattctgatgaatggccagaattgtttaatactttgggtgatgattctaaattgattactgctttttctagagaaactgaacataaagtttatgttcaacatagattggaagaaaatggtaaagatatttggcaattgttggaaaaaggtgcttatatttatgtttgtggtgatgctagaaatatggctagagatgttaatcaaacttttgttaatttggctatggaatatggtgaaaaaactgaacaaaaagcattggattatgttaaatctttgagaaatactggtagataccaagaagatgtttggtcttag

SEQ ID NO: 307 - protein, 1289 aa, Camellia japonica
MAEENGLDGDLNNHQATASTSNSPVQGANGTSETKGAQEKSEKSKEEEKIGQSVPYYKLLSFADSKDVLLMVIGTIAAVANGASMPVMTLLLGDLINAFGQNANNTDTLRVVSKVALKFVYLSIGAGVASFFQVACWMVTGERQAARIRSLYLKTILRQDVAFFDKETNTGEVVGRMSGDTVLIQDAIGEKVGKFIQLFSTFIGGFLIAFVKGWLLTLVMLTSIPPLVFCGALMTITISKMASRGQVAYSQAGIVVEQTIGSIRTVASFTGEKHAVTQYEKYLNKAYLAGIHEGLASGVGLGSVLLVIFCSYSLAVWFGGKMIIEKGYNGGNVINIIVAVLTGSMSLGQASPCLGAFAAGQAAAYKMLETIKRKPEIDSYDTSGHKSDDIRGDIELRDVSFTYPARPDEQIFNGFSLFIPSGTTSALVGQSGSGKSTVISLIERFYDPQAGEVLIDGVNLKDFQLRWIRGKIGLVSQEPVLFASSIRDNIAYGKDGATVEEIKAATERANASKFIDKLPQGLDTLVGEHGTQLSGGQKQRIAIARAILKDPRILLLDEATSALDAESEHIVQEALDRIMVNRTTVIVAHRLSTVRNADTIAVIHRGKIVEKGSHLDLLLNPDGAYCQLIRLQEIGRSEVDKAENVESGLNSSQQHSIGRSISRGSSGVGNSSRHSFSVSFGLPTGHIYETTAGLESTSPAPIGQTQEVPLRRLATLNKPEIPVLLLGVISAMVNGVIFPIFGVLLSSVIKTFYEPEDKLRKDTRFWAFMFIILGVASFVAAPATAYFFAVAGCRLIQRIRSMCFRTVAHMEIDWFDEPEHASGAIGAKLSADASTVRGLVGDALALLVQNAATAVCGLVIAFVANWTLALIILVLIPLIGVNGYVQMKFMKGFSADAKMMYEEASQVANDAVGSIRTVASFCAEEKVMQLYKKKCEGPMKTGIRQGLISGIGFGISFFLLFNVYATSFYAGARLVDAGKTTFSDVFRVFFALTMAALGISQSSSLAPDSSKAKSSTASIFGILDRKSKIDSSDESGMTVENVKGEIELRHISFKYPTRPDIQIFRDLSLAIHSGKTVALVGESGSGKSTVISLLQRFYDPDSGHITLDGIEIQKFQLRWLRLQMGLVSQEPVLFNETIRANIAYGKEGDATETEILAAAELANAHKFISGLQQGYDTVVGERGIQLSGGQKQRVAIARAMVKAPKILLLDEATSALDAESERVVQDALDKVMVNRTTVWVAHRLSTIKNADVIAVVKNGVIAEKGKHNDLINVKDGVYASLVALHTSAS

SEQ ID NO: 308 - DNA, 3870 bp, Camellia japonica
  source 1..3870: mol_type = other DNA
atggccgaggagaacggtttggatggtgatttgaacaaccatcaagctactgcttctacttctaactctccagttcaaggtgctaatggtacttctgaaacaaaaggtgctcaagagaagtccgaaaagtccaaagaagaagaaaagatcggtcaatccgttccttactacaagttgttgtctttcgctgattccaaggatgttttgttgatggttattggtactattgctgctgttgcaaatggtgcttctatgccagttatgactttgttgttgggtgacttgattaacgcttttggtcaaaacgctaacaacaccgatactttgagagttgtttctaaggttgccttgaagttcgtctacttgtctattggtgctggtgttgcttcatttttccaagttgcttgctggatggttactggtgaaagacaagctgctagaatcagatccttgtacttgaaaaccatcttgagacaagatgttgccttcttcgacaaagaaactaacactggtgaagttgtcggtagaatgtctggtgatactgttttgattcaagatgccatcggtgaaaaggtcggtaagttcattcaactgttctctacctttatcggtggtttcttgattgcttttgtcaaaggttggttgttgaccttggttatgttgacttctattccaccattggttttctgtggtgctttgatgactattaccatttccaagatggcttccagaggtcaagttgcatattctcaagctggtatcgttgtcgaacaaaccattggtagtattagaaccgttgcttctttcacaggtgaaaaacatgctgttacccagtacgaaaagtacttgaacaaagcttacttggccggtattcatgaaggtttggcttcaggtgttggtttgggttctgttttgttagttatcttctgctcctactctttggctgtttggtttggtggtaagatgattatcgaaaagggttacaatggtggcaacgtcattaacattatcgttgctgttttgaccggctctatgtctttgggtcaagcttctccatgtttgggtgcttttgctgctggtcaagctgctgcatacaaaatgttggaaaccattaagaggaagccagagatcgattcttatgatacttctggtcacaagtccgatgatatcagaggtgatattgaattgagggatgtctcttttacttacccagctagaccagatgaacaaatctttaacggtttctccttgttcatcccatctggtactacatctgctttggttggtcaatctggttctggtaagtctaccgttatctccttgattgaaagattctacgatccacaagccggtgaagttttaattgatggtgttaacttgaaggacttccagttgagatggattagaggtaaaatcggcttggtttctcaagaaccagttttgttcgcttcctccatcagagataatattgcttacggtaaagatggtgccaccgttgaagaaatcaaagctgctactgaaagagctaacgcctctaaattcattgacaaattgccacaaggtttggataccttggttggtgaacatggtactcaattgtctggtggtcaaaagcaaagaattgctattgctagagccattttgaaggacccaagaatcttgttgttagatgaagctacttcagctttggatgccgaatctgaacatatagttcaagaagccttggacagaatcatggttaacagaactactgttattgtcgcccatagattgtccactgttagaaatgctgataccattgccgttatccatagaggtaagattgtcgaaaaaggttcccacttggacttgttgttgaatccagatggtgcttactgccaattgatcagattgcaagaaatcggtagatccgaagttgataaggctgaaaatgttgagtctggcttgaactcttctcaacaacattctatcggtaggtctatctctagaggttctagtggtgttggtaactcttctagacattccttctctgtttctttcggtttccccaccggccacatctacgagaccactgctggtttggaatctacttctccagctccaattggtcaaactcaagaagttccattgagaagattggctactttgaacaagccagaaattccagtcttgctgttgggtgttatttctgctatggttaacggtgttatcttcccaattttcggtgtcttgttgtcctctgttattaagactttctatgaacccgaggacaagttgagaaaggataccagattttgggctttcatgttcattattttgggtgttgcctcttttgttgctgctccagctacagcttacttttttgctgttgctggttgcagattgatccaaagaattagatctatgtgcttcagaaccgtcgctcatatggaaattgattggtttgatgaaccagaacatgcctctggtgcaattggtgctaaattgtctgctgatgcttctacagttagaggtttggtcggtgatgctttggctttgttggttcaaaatgctgctacagctgtttgcggtttggttattgcatttgttgctaattggaccttggccttgattatcttggttttgatccctttgattggtgtcaacggttacgttcaaatgaagtttatgaagggtttttccgctgatgccaagatgatgtatgaagaagcttcacaagttgctaacgatgccgttggttctataagaactgttgcatctttttgcgctgaagaaaaggttatgcagctgtacaagaaaaagtgtgaaggtcctatgaagaccggtatcagacaaggtttaatttccggtattggtttcggtatctccttcttcttgttattcaacgtttacgccacttctttttacgctggtgctagattggttgatgctggtaaaactactttctccgatgtgttcagagttttctttgccttgactatggctgctttgggtatttctcaatcttcttcattggctccagattcctctaaggctaaatcttctaccgcttccattttcggtattctggacagaaagtccaagatcgatagttctgatgaatccggtatgactgttgaaaacgttaagggtgaaatcgagttgagacacatctcttttaagtatccaaccagaccagacatccaaatcttcagagatttgtccttggctattcactctggtaagactgttgctttagttggtgaaagtggtagcggtaagtcaactgttattagcttgttgcagagattttacgacccagattcaggtcatattaccttggatggtatcgagatccaaaagttccaactaagatggttgagattgcagatgggtttagttagtcaagagcctgtcttgttcaacgaaactattagagctaacattgcctatggcaaagaaggtgacgctacagaaactgaaattttggctgctgctgaattggctaatgctcataagtttatttccggcttgcaacaaggttacgatactgttgtaggtgaaagaggtattcaactatcaggtggacaaaaacagagagttgcaatcgcaagagcaatggttaaggctccaaagattttgttattggatgaagccacatctgcattggacgctgaatcagaaagagttgttcaagacgctttggataaggttatggtcaatagaactacagtttgggttgctcacagattgtctactattaagaacgctgatgttatcgccgttgttaagaatggtgttattgctgaaaagggtaagcacaacgatttgatcaatgttaaggacggtgtttacgcttctttagttgcattgcatacctccgcctcctaa

SEQ ID NO: 309 - protein, 646 aa, Noccaea caerulescens
MKSRVILSHRERKDKNKGIFCNYTQIETMERKPFEVETATDDHKPYSAVDGRGSDVTSTVDSFEEDQEKLVYRGWKVMPFIIGNETFEKIGIIGTLSNLLVYLTSVFNLKSYTAATIISAFAGTINFGTFVAAFLCDTYFGRYKTLSVAVIACFLGSLVILLTAAVPSLHPTPCGNKLLCEGPDGGQIAFLLLGLALLVVGAGGIRPCNLAFGADQFNPKSESGKKGINSFFNWYFFTFTFAQIISLTLVVYVQSNVSWTIGLSIPVGLMFLACVIFFAGHKLYVKVKASGSPLAGILHVIAAAIKKRGLKQVKQPWTNLYNHIPPNYANTTLKYTDQFRFLDKAAIMTPEDKLNSDGTASDPWKLCTLQQVEEMKCIVRVIPIWFACAVYYLAITMQMTYPVFQALQSDRRLGSAGFKIPAATYVVFLMTGMTVFIIIYDRVLVPSLKRVTGLDTGITVLQRIGAGIFFAVLSVLVSGFVEERRRNTALTKPTLGMAPRTGAISSMSAMWLVPQLTLAGVAEAFAAIGQMELYYKQFPENMKSFAGSLFYVGAGVSSYLASFLISTIHRTTQHSPTGNWLAEDLNKGKLDYFYFMLTGLMVVNMLYFLLMAKWYRYKGSNDEDISEIETNEEKAKQQEKQDKNSV

SEQ ID NO: 310 - DNA, 1941 bp, Noccaea caerulescens
  source 1..1941: mol_type = other DNA
atgaagtcccgcgtcatcctctcccaccgcgagcgcaaggacaagaacaagggcatcttctgcaactacacccagatcgagaccatggagcgcaagcccttcgaggtcgagaccgccaccgacgaccacaagccctactccgccgtcgacggccgcggctccgacgtcacctccaccgtcgactccttcgaggaggaccaggagaagctcgtctaccgcggctggaaggtcatgcccttcatcatcggcaacgagaccttcgagaagatcggcatcatcggcaccctctccaacctcctcgtctacctcacctccgtcttcaacctcaagtcctacaccgccgccaccatcatctccgccttcgccggcaccatcaacttcggcaccttcgtcgccgccttcctctgcgacacctacttcggccgctacaagaccctctccgtcgccgtcatcgcctgcttcctcggctccctcgtcatcctcctcaccgccgccgtcccctccctccaccccaccccctgcggcaacaagctcctctgcgagggccccgacggcggccagatcgccttcctcctcctcggcctcgccctcctcgtcgtcggcgccggcggcatccgcccctgcaacctcgccttcggcgccgaccagttcaaccccaagtccgagtccggcaagaagggcatcaactccttcttcaactggtacttcttcaccttcaccttcgcccagatcatctccctcaccctcgtcgtctacgtccagtccaacgtctcctggaccatcggcctctccatccccgtcggcctcatgttcctcgcctgcgtcatcttcttcgccggccacaagctctacgtcaaggtcaaggcctccggctcccccctcgccggcatcctccacgtcatcgccgccgccatcaagaagcgcggcctcaagcaggtcaagcagccctggaccaacctctacaaccacatcccccccaactacgccaacaccaccctcaagtacaccgaccagttccgcttcctcgacaaggccgccatcatgacccccgaggacaagctcaactccgacggcaccgcctccgacccctggaagctctgcaccctccagcaggtcgaggagatgaagtgcatcgtccgcgtcatccccatctggttcgcctgcgccgtctactacctcgccatcaccatgcagatgacctaccccgtcttccaggccctccagtccgaccgccgcctcggctccgccggcttcaagatccccgccgccacctacgtcgtcttcctcatgaccggcatgaccgtcttcatcatcatctacgaccgcgtcctcgtcccctccctcaagcgcgtcaccggcctcgacaccggcatcaccgtcctccagcgcatcggcgccggcatcttcttcgccgtcctctccgtcctcgtctccggcttcgtcgaggagcgccgccgcaacaccgccctcaccaagcccaccctcggcatggccccccgcaccggcgccatctcctccatgtccgccatgtggctcgtcccccagctcaccctcgccggcgtcgccgaggccttcgccgccatcggccagatggagctctactacaagcagttccccgagaacatgaagtccttcgccggctccctcttctacgtcggcgccggcgtctcctcctacctcgcctccttcctcatctccaccatccaccgcaccacccagcactcccccaccggcaactggctcgccgaggacctcaacaagggcaagctcgactacttctacttcatgctcaccggcctcatggtcgtcaacatgctctacttcctcctcatggccaagtggtaccgctacaagggctccaacgacgaggacatctccgagatcgagaccaacgaggagaaggccaagcagcaggagaagcaggacaagaactccgtctga

SEQ ID NO: 311 - protein, 654 aa, Eutrema salsugineum
MKSRVILSHRERRDNINNNRDSFCNYTQIDTMERKPFEVETTTTTTATEDHKPYSAVDGGGSDLTSTVDSFDDEQKKLVYRGWKVMPFIIGNETFEKIGIIGTLSNLLVYLTQVFNLKSVTAATIINAFSGTINFGTFVAAFLCDTYFGRYKTLSVAVIACFLGSFVILMTAAVPGLHPTPCGTKSFCQGPSGGQIAFLLMGLALLVVGAGGIRPCNLAFGADQFNPKSESGKKGINSFFNWYFFTFTFAQIISLTLVVYIQSNVSWTIGLSIPVGLMFLACVIFFAGDKLYVKVKASGSPLASIGHVIVAAIKKRGLKPVKQPWLELYNHIPINYPNTTLKYTDQFRFLDKAAIMTPEDKLKSDGAASDPWKLCTMQHVEEVKCIVRVIPIWFACAIYYLAISMQMTYPVFQAFQGDRRLGSGGFKIPAATYVVFLMTGMTVFIIFYDRVLVPSLRRVTRLDTGITLLQRIGAGIFFAVLSLLVSAFIEERRRNFALTRPTLGIEPRRGEISSMSAMWLIPQLLLAGVAEAFAAIGQMEFYYKQFPENMKSFAGSIFYVGAGVSSYLSSFLISTVHRMTEHSPSGNWLAEDLNKGKLDYFYFMLTGLMVVNMVYFLLVAKWYRYKGSNDEDKPVIETNEEEKKQHQQLDKNSV

SEQ ID NO: 312 - DNA, 1965 bp, Eutrema salsugineum
  source 1..1965: mol_type = other DNA
atgaagtcccgcgtcatcctctcccaccgcgagcgccgcgacaacatcaacaacaaccgcgactccttctgcaactacacccagatcgacaccatggagcgcaagcccttcgaggtcgagaccaccaccaccaccaccgccaccgaggaccacaagccctactccgccgtcgacggcggcggctccgacctcacctccaccgtcgactccttcgacgacgagcagaagaagctcgtctaccgcggctggaaggtcatgcccttcatcatcggcaacgagaccttcgagaagatcggcatcatcggcaccctctccaacctcctcgtctacctcacccaggtcttcaacctcaagtccgtcaccgccgccaccatcatcaacgccttctccggcaccatcaacttcggcaccttcgtcgccgccttcctctgcgacacctacttcggccgctacaagaccctctccgtcgccgtcatcgcctgcttcctcggctccttcgtcatcctcatgaccgccgccgtccccggcctccaccccaccccctgcggcaccaagtccttctgccagggcccctccggcggccagatcgccttcctcctcatgggcctcgccctcctcgtcgtcggcgccggcggcatccgcccctgcaacctcgccttcggcgccgaccagttcaaccccaagtccgagtccggcaagaagggcatcaactccttcttcaactggtacttcttcaccttcaccttcgcccagatcatctccctcaccctcgtcgtctacatccagtccaacgtctcctggaccatcggcctctccatccccgtcggcctcatgttcctcgcctgcgtcatcttcttcgccggcgacaagctctacgtcaaggtcaaggcctccggctcccccctcgcctccatcggccacgtcatcgtcgccgccatcaagaagcgcggcctcaagcccgtcaagcagccctggctcgagctctacaaccacatccccatcaactaccccaacaccaccctcaagtacaccgaccagttccgcttcctcgacaaggccgccatcatgacccccgaggacaagctcaagtccgacggcgccgcctccgacccctggaagctctgcaccatgcagcacgtcgaggaggtcaagtgcatcgtccgcgtcatccccatctggttcgcctgcgccatctactacctcgccatctccatgcagatgacctaccccgtcttccaggccttccagggcgaccgccgcctcggctccggcggcttcaagatccccgccgccacctacgtcgtcttcctcatgaccggcatgaccgtcttcatcatcttctacgaccgcgtcctcgtcccctccctccgccgcgtcacccgcctcgacaccggcatcaccctcctccagcgcatcggcgccggcatcttcttcgccgtcctctccctcctcgtctccgccttcatcgaggagcgccgccgcaacttcgccctcacccgccccaccctcggcatcgagccccgccgcggcgagatctcctccatgtccgccatgtggctcatcccccagctcctcctcgccggcgtcgccgaggccttcgccgccatcggccagatggagttctactacaagcagttccccgagaacatgaagtccttcgccggctccatcttctacgtcggcgccggcgtctcctcctacctctcctccttcctcatctccaccgtccaccgcatgaccgagcactccccctccggcaactggctcgccgaggacctcaacaagggcaagctcgactacttctacttcatgctcaccggcctcatggtcgtcaacatggtctacttcctcctcgtcgccaagtggtaccgctacaagggctccaacgacgaggacaagcccgtcatcgagaccaacgaggaggagaagaagcagcaccagcagctcgacaagaactccgtctaa

SEQ ID NO: 313 - protein, 616 aa, Arabidopsis lyrata subsp. lyrata
MERKPLEVESTDNHQSPSSAVYGGSVTAVDPVEEDVQNQEKLVYRGWKVMPFIIGNETFEKLGIIGTLSNLLVYLTAVFNLKSITAATIINAFSGTINFGTFIAAFLCDTYFGRYKTLSVAVIACFLGSFVILLTAAVPQLHPAPCGTAANSICNGPSGGQIAFLLMGLGFLVVGAGGIRPCNLAFGADQFNPKSESGKRGIDSFFNWYFFTFTFAQILSLTLVVYVQSNVSWTIGLTIPAVLMFLACLIFFAGDKLYVKIKASGSPLAGIAQVIAVAIKKRGLKPAKQPWLNLYNYYPPNYANSKLKYTDQFRFLDKAAIMTPEDKLQPDGKPADPWKLCTMQQVEEVKCIVRVLPIWFASSIYYLTITQQMTYPVFQALQSDRRLGPGGFVIPAATYVVFLMTGMTVFIVVYDRVLVPTMRRITGLDTGITLLQRIGTGIFFATASLVVAGFVEERRRTFALTKPTLGMAPRKGEISSMSAMWLIPQLSLAGVAEAFAAIGQMEFYYKQFPENMRSFAGSIFYVGGGVSSYLGSFLIATVHRMTQNSSGGNWLAEDLNKGRLDLFYFMIAGILAVNFAYFLVMSRWYRYKGSDDEVTTYETNEHIIKQQDKNVA

SEQ ID NO: 314 - DNA, 1851 bp, Arabidopsis lyrata subsp. lyrata
  source 1..1851: mol_type = other DNA
atggagcgcaagcccctcgaggtcgagtccaccgacaaccaccagtccccctcctccgccgtctacggcggctccgtcaccgccgtcgaccccgtcgaggaggacgtccagaaccaggagaagctcgtctaccgcggctggaaggtcatgcccttcatcatcggcaacgagaccttcgagaagctcggcatcatcggcaccctctccaacctcctcgtctacctcaccgccgtcttcaacctcaagtccatcaccgccgccaccatcatcaacgccttctccggcaccatcaacttcggcaccttcatcgccgccttcctctgcgacacctacttcggccgctacaagaccctctccgtcgccgtcatcgcctgcttcctcggctccttcgtcatcctcctcaccgccgccgtcccccagctccaccccgccccctgcggcaccgccgccaactccatctgcaacggcccctccggcggccagatcgccttcctcctcatgggcctcggcttcctcgtcgtcggcgccggcggcatccgcccctgcaacctcgccttcggcgccgaccagttcaaccccaagtccgagtccggcaagcgcggcatcgactccttcttcaactggtacttcttcaccttcaccttcgcccagatcctctccctcaccctcgtcgtctacgtccagtccaacgtctcctggaccatcggcctcaccatccccgccgtcctcatgttcctcgcctgcctcatcttcttcgccggcgacaagctctacgtcaagatcaaggcctccggctcccccctcgccggcatcgcccaggtcatcgccgtcgccatcaagaagcgcggcctcaagcccgccaagcagccctggctcaacctctacaactactacccccccaactacgccaactccaagctcaagtacaccgaccagttccgcttcctcgacaaggccgccatcatgacccccgaggacaagctccagcccgacggcaagcccgccgacccctggaagctctgcaccatgcagcaggtcgaggaggtcaagtgcatcgtccgcgtcctccccatctggttcgcctcctccatctactacctcaccatcacccagcagatgacctaccccgtcttccaggccctccagtccgaccgccgcctcggccccggcggcttcgtcatccccgccgccacctacgtcgtcttcctcatgaccggcatgaccgtcttcatcgtcgtctacgaccgcgtcctcgtccccaccatgcgccgcatcaccggcctcgacaccggcatcaccctcctccagcgcatcggcaccggcatcttcttcgccaccgcctccctcgtcgtcgccggcttcgtcgaggagcgccgccgcaccttcgccctcaccaagcccaccctcggcatggccccccgcaagggcgagatctcctccatgtccgccatgtggctcatcccccagctctccctcgccggcgtcgccgaggccttcgccgccatcggccagatggagttctactacaagcagttccccgagaacatgcgctccttcgccggctccatcttctacgtcggcggcggcgtctcctcctacctcggctccttcctcatcgccaccgtccaccgcatgacccagaactcctccggcggcaactggctcgccgaggacctcaacaagggccgcctcgacctcttctacttcatgatcgccggcatcctcgccgtcaacttcgcctacttcctcgtcatgtcccgctggtaccgctacaagggctccgacgacgaggtcaccacctacgagaccaacgagcacatcatcaagcagcaggacaagaacgtcgcctaa

SEQ ID NO: 315 - protein, 641 aa, Capsella rubella
MKSRVRRDKKNNDNNNNDLFCCNYTQIETMERKPLEVETTTTTTTTTDDVTSTTVDSFEEEQKKLVYRGWRVMPFIIGNETFEKLGIIGTLSNLLVYLTSVFNLKSYTAATIINAFSGTINFGTFIAAFLCDTYFGRYKTLCVAVIACFLGSFVILLTAAVPSLHPIACGNKSTCEGPSVGQIMFLLMGLGFLVVGAGGIRPCNLAFGADQFNPKSESGKKGINSFFNWYFFTFTFAQIISLTLIVYIQSNVSWTIGLTIPVVLMFLACVIFFAGDRLYVKVKASGSPLAGIAHVIAAAIKKRGLKPVKQPWVDLYNHIPRNYVNTTLKYTDQLRFLDKAAIMTPEDKLNSDGAASDPWKLCTLQQVEEVKCIVRVIPIWLASSVYYLAISMQMTYPVFQALQSDRRLGSGGFRIPGATYVVFLMTGMTVFIVFYDRVLVPSLRRVTGLETGITLLQRIGAGIVFSILSLLVSGFIEERRRTFALTRPTLGMAPRTGEISSMSALWLIPQLTLAGIAEAFAAIGQMEFYYKQFPENMKSFAGSIFYIGGGISSYLASFLISTVHRTTEHSPSGNWLAEDLNKAKLDYFYFMLTGIMVVNFGYFLLMAKWYRYKGSNDEDITEIEKNEEETKQQQLQDKNSV

SEQ ID NO: 316 - DNA, 1926 bp, Capsella rubella
  source 1..1926: mol_type = other DNA
atgaagtcccgcgtccgccgcgacaagaagaacaacgacaacaacaacaacgacctcttctgctgcaactacacccagatcgagaccatggagcgcaagcccctcgaggtcgagaccaccaccaccaccaccaccaccaccgacgacgtcacctccaccaccgtcgactccttcgaggaggagcagaagaagctcgtctaccgcggctggcgcgtcatgcccttcatcatcggcaacgagaccttcgagaagctcggcatcatcggcaccctctccaacctcctcgtctacctcacctccgtcttcaacctcaagtcctacaccgccgccaccatcatcaacgccttctccggcaccatcaacttcggcaccttcatcgccgccttcctctgcgacacctacttcggccgctacaagaccctctgcgtcgccgtcatcgcctgcttcctcggctccttcgtcatcctcctcaccgccgccgtcccctccctccaccccatcgcctgcggcaacaagtccacctgcgagggcccctccgtcggccagatcatgttcctcctcatgggcctcggcttcctcgtcgtcggcgccggcggcatccgcccctgcaacctcgccttcggcgccgaccagttcaaccccaagtccgagtccggcaagaagggcatcaactccttcttcaactggtacttcttcaccttcaccttcgcccagatcatctccctcaccctcatcgtctacatccagtccaacgtctcctggaccatcggcctcaccatccccgtcgtcctcatgttcctcgcctgcgtcatcttcttcgccggcgaccgcctctacgtcaaggtcaaggcctccggctcccccctcgccggcatcgcccacgtcatcgccgccgccatcaagaagcgcggcctcaagcccgtcaagcagccctgggtcgacctctacaaccacatcccccgcaactacgtcaacaccaccctcaagtacaccgaccagctccgcttcctcgacaaggccgccatcatgacccccgaggacaagctcaactccgacggcgccgcctccgacccctggaagctctgcaccctccagcaggtcgaggaggtcaagtgcatcgtccgcgtcatccccatctggctcgcctcctccgtctactacctcgccatctccatgcagatgacctaccccgtcttccaggccctccagtccgaccgccgcctcggctccggcggcttccgcatccccggcgccacctacgtcgtcttcctcatgaccggcatgaccgtcttcatcgtcttctacgaccgcgtcctcgtcccctccctccgccgcgtcaccggcctcgagaccggcatcaccctcctccagcgcatcggcgccggcatcgtcttctccatcctctccctcctcgtctccggcttcatcgaggagcgccgccgcaccttcgccctcacccgccccaccctcggcatggccccccgcaccggcgagatctcctccatgtccgccctctggctcatcccccagctcaccctcgccggcatcgccgaggccttcgccgccatcggccagatggagttctactacaagcagttccccgagaacatgaagtccttcgccggctccatcttctacatcggcggcggcatctcctcctacctcgcctccttcctcatctccaccgtccaccgcaccaccgagcactccccctccggcaactggctcgccgaggacctcaacaaggccaagctcgactacttctacttcatgctcaccggcatcatggtcgtcaacttcggctacttcctcctcatggccaagtggtaccgctacaagggctccaacgacgaggacatcaccgagatcgagaagaacgaggaggagaccaagcagcagcagctccaggacaagaactccgtctaa

SEQ ID NO: 317 - protein, 607 aa, Populus trichocarpa
MEKRDERGSIGEENGKESVQNDLKETMGNSGEDETNSKPKVIYRGWKVMPFIIGNETFEKLGTIGTLSNLLIYLTTVFNMKSITAATIITVFNGTANLGTLIGAFLCDTYFGRYKTIGFATVASFLGLLAIQLTAAISKLHPPHCAKESITCIGPTGGQIAFLLAGFILMIIGAGGIRPCNLAFGADQFDPETESGKRGVNSFFNWYFFTFTFAQMISLTLIVYVQSNVSWPIGLGIPAILMLISCLVYYMGTKLYVKVKATGSPMTSVARVIVVAVKKRKLKPVDQPWLSLFNYIPPKSINSKLSYTDQFRFLDKAAIMTHQDQVNPDGSPANPWKLCSLQQVEEVKCLFRVIPVWTAAIIYYVAVVQQHTYVVFQAVQSNRRLGNSNFAIPAASYIVFLMLSMSIFIPIYDRILVPFLRRITGKEAGITILQRIGVGIFLTIVTMLVSGLVEEKRRTIALTKPTLGNAPRKGAISSMSALWLIPQLSLSGIAEAFGSIGQVEFYYKQFPENMRSIGGSLFYCGMAASSYFSSLLITVVHQTTNGAATGNWLSEDLNKGRLDYYYYMIAALGVLNMGYFLLCARWYKYKGGKDDALLELCGGEKTI

SEQ ID NO: 318 - DNA, 1824 bp, Populus trichocarpa
  source 1..1824: mol_type = other DNA
atggaaaagagagatgagaggggttccattggtgaagaaaatggtaaagaatccgtccagaacgacttgaaagaaactatgggtaattctggtgaggacgagactaattctaagccaaaagttatctacagaggctggaaagttatgccattcattattggtaacgaaaccttcgagaagttgggtactattggtactttgtccaacctgttgatctacttgactaccgttttcaacatgaagtctattaccgctgctaccattatcactgtttttaacggtactgctaacttgggtactttgattggtgctttcttgtgtgatacttacttcggtagatacaagaccattggttttgctactgttgcttctttcttgggtttgttggctattcaattgactgctgccatttctaaattgcatccaccacattgtgccaaagaatccattacttgtattggtccaactggtggtcaaattgcttttttgttagccggtttcatcctgatgattattggtgctggtggtattagaccatgtaatttggcttttggtgccgatcaatttgatccagaaactgaatctggtaagagaggtgttaactctttcttcaactggtacttcttcactttcaccttcgctcaaatgatctctttgaccttgatcgtttacgtccagtctaatgtttcttggccaattggtttgggtattccagctattttgatgctgatttcctgcttggtttactacatgggtactaagttgtacgttaaggttaaggctactggttctccaatgacttctgttgctagagttatagttgttgccgtcaagaagagaaagttgaagccagttgatcagccatggttgtctttgtttaattacatcccaccaaagtccatcaactccaagttgtcttatactgaccagttcagattcttggataaggctgctattatgacccaccaagatcaagttaatccagatggttcaccagctaatccatggaaattgtgttcattgcaacaagtcgaagaggtcaagtgtttgttcagagttattccagtttggactgccgctattatctattacgttgctgttgtccaacaacacacctacgttgtttttcaagctgtccaatctaacagaaggttgggtaactctaattttgctattccagcagcctcttacatcgtgtttttgatgttgtccatgtccatcttcatcccaatctacgatagaattttggtcccattcttgagaaggatcacaggtaaagaagctggtattaccatcttgcaaagaatcggtgttggtatctttttgaccatcgttaccatgttggtttccggtttagtcgaagaaaagagaagaactattgctttgactaagccaactttgggtaatgctccaagaaaaggtgctatctcttctatgtctgctttgtggttgattccccaattgtcattgtctggtattgctgaagctttcggttctattggtcaagtcgaattctactacaagcagttcccagaaaacatgagatctattggtggttctttgttctactgtggtatggctgcttcttcttacttctcatctttgttgatcaccgttgttcatcaaactactaatggtgctgctactggtaattggttgtctgaagatttgaacaagggcagattggattactactactacatgattgctgccttgggtgttttgaatatgggttactttttgttgtgcgccagatggtataagtacaaaggtggtaaagatgacgccttgttggaattgtgtggtggtgaaaaaaccatctaa

SEQ ID NO: 319 - protein, 634 aa, Brassica napus
MKSRVILSHRERRDKHNYTQIETMERKPFDVETTEDHKAYSSVDGGGSDSVDSFEDEQKKLVYRGWKVMPFIIGNETFEKIGIIGTLSNLLVYLTSVFNLQSVTAATIINAFSGTINFGTFLAAFLCDTYFGRYKTLSVAVIACFLGSLVILLTAAVPGLHPIPCGTQSSCQGPSEGQIAFLLMGLALLVVGAGGIRPCNLAFGADQFNPKSESGKKGINSFFNWYFFTFTFAQIISLTLVVYIQSNVSWTIGLSIPVGLMFLACVIFFAGHKLYVKVKASGSPLAGIGHVIAAAIKKRGLKPVKQPWIDLYNHIPPNYANSTLKYTDQLRFLDKAAIMTPEDKLNSDGTASDPWKLCTMQKVEEVKCILRVIPIWFACAIYYLAISMQMTYPVFQALQSDRLLGSGGFKIPAATYVVFLMSGMTVFIIIYDRVLVPSLKRVTGLDTGITLLQRIGAGIFFAVLSLLVSGFIEERRRTFALTRPTLGSEPRTGEISSMSAMWLIPQLVLAGVAEAFVAIGQMEFYYKQFPENMKSFAGSIFYVGGGVSSYLASFLISTVHRTTEHSPTGNWLAEDLNKAKLDYFYFMLTGLMFVNFLYFLLMARWYRYKGTHDEVSYVVDTVDEETKQQDKNSV

SEQ ID NO: 320 - DNA, 1905 bp, Brassica napus
  source 1..1905: mol_type = other DNA
atgaagtcccgcgtcatcctctcccaccgcgagcgccgcgacaagcacaactacacccagatcgagaccatggagcgcaagcccttcgacgtcgagaccaccgaggaccacaaggcctactcctccgtcgacggcggcggctccgactccgtcgactccttcgaggacgagcagaagaagctcgtctaccgcggctggaaggtcatgcccttcatcatcggcaacgagaccttcgagaagatcggcatcatcggcaccctctccaacctcctcgtctacctcacctccgtcttcaacctccagtccgtcaccgccgccaccatcatcaacgccttctccggcaccatcaacttcggcaccttcctcgccgccttcctctgcgacacctacttcggccgctacaagaccctctccgtcgccgtcatcgcctgcttcctcggctccctcgtcatcctcctcaccgccgccgtccccggcctccaccccatcccctgcggcacccagtcctcctgccagggcccctccgagggccagatcgccttcctcctcatgggcctcgccctcctcgtcgtcggcgccggcggcatccgcccctgcaacctcgccttcggcgccgaccagttcaaccccaagtccgagtccggcaagaagggcatcaactccttcttcaactggtacttcttcaccttcaccttcgcccagatcatctccctcaccctcgtcgtctacatccagtccaacgtctcctggaccatcggcctctccatccccgtcggcctcatgttcctcgcctgcgtcatcttcttcgccggccacaagctctacgtcaaggtcaaggcctccggctcccccctcgccggcatcggccacgtcatcgccgccgccatcaagaagcgcggcctcaagcccgtcaagcagccctggatcgacctctacaaccacatcccccccaactacgccaactccaccctcaagtacaccgaccagctccgcttcctcgacaaggccgccatcatgacccccgaggacaagctcaactccgacggcaccgcctccgacccctggaagctctgcaccatgcagaaggtcgaggaggtcaagtgcatcctccgcgtcatccccatctggttcgcctgcgccatctactacctcgccatctccatgcagatgacctaccccgtcttccaggccctccagtccgaccgcctcctcggctccggcggcttcaagatccccgccgccacctacgtcgtcttcctcatgtccggcatgaccgtcttcatcatcatctacgaccgcgtcctcgtcccctccctcaagcgcgtcaccggcctcgacaccggcatcaccctcctccagcgcatcggcgccggcatcttcttcgccgtcctctccctcctcgtctccggcttcatcgaggagcgccgccgcaccttcgccctcacccgccccaccctcggctccgagccccgcaccggcgagatctcctccatgtccgccatgtggctcatcccccagctcgtcctcgccggcgtcgccgaggccttcgtcgccatcggccagatggagttctactacaagcagttccccgagaacatgaagtccttcgccggctccatcttctacgtcggcggcggcgtctcctcctacctcgcctccttcctcatctccaccgtccaccgcaccaccgagcactcccccaccggcaactggctcgccgaggacctcaacaaggccaagctcgactacttctacttcatgctcaccggcctcatgttcgtcaacttcctctacttcctcctcatggcccgctggtaccgctacaagggcacccacgacgaggtctcctacgtcgtcgacaccgtcgacgaggagaccaagcagcaggacaagaactccgtctaa

SEQ ID NO: 321 - protein, 634 aa, Brassica oleracea var. oleracea
MKSRVVLSHRERRDKHNYTQIETMERKPFDVETTEDHKPYSSVDGGGSDSVDSFEDEQKKLVYRGWKVMPFIIGNETFEKIGIIGTLSNLLVYLTSVFNLQSVTAATIINAFSGTINFGTFLAAFLCDTYFGRYKTLSVAVIACFLGSLVILLTAAVPGLHPIPCGTQSSCQGPSEGQIAFLLMGLALLVVGAGGIRPCNLAFGADQFNPKSESGKKGINSFFNWYFFTFTFAQIISLTLVVYIQSNVSWTIGLSIPVGLMFLACVIFFAGHKLYVKVKASGSPLAGIGHVIAAAIKKRGLKPVKQPWIDLYNHIPPNYANSTLKYTDQLRFLDKAAIMTPEDKLNSDGTASDPWKLCTMQKVEEVKCILRVIPIWFACAIYYLAISMQMTYPVFQALQSDRLLGSGGFKIPAATYVVFLMSGMTVFIIIYDRVLVPSLKRVTGLDTGITLLQRIGAGIFFAVLSLLVSGFIEERRRTFALTRPTLGSEPRTGEISSMSAMWLIPQLVLAGVAEAFAAIGQMEFYYKQFPENMKSFAGSIFYVGGGVSSYLASFLISTVHRTTEHSPTGNWLAEDLNKAKLDYFYFMLTGLMFVNFLYFLLMARWYRYKGTHDEVSYVVDTVDEETKQQDKNSV

SEQ ID NO: 322 - DNA, 1905 bp, Brassica oleracea var. oleracea
  source 1..1905: mol_type = other DNA
atgaagtcccgcgtcgtcctctcccaccgcgagcgccgcgacaagcacaactacacccagatcgagaccatggagcgcaagcccttcgacgtcgagaccaccgaggaccacaagccctactcctccgtcgacggcggcggctccgactccgtcgactccttcgaggacgagcagaagaagctcgtctaccgcggctggaaggtcatgcccttcatcatcggcaacgagaccttcgagaagatcggcatcatcggcaccctctccaacctcctcgtctacctcacctccgtcttcaacctccagtccgtcaccgccgccaccatcatcaacgccttctccggcaccatcaacttcggcaccttcctcgccgccttcctctgcgacacctacttcggccgctacaagaccctctccgtcgccgtcatcgcctgcttcctcggctccctcgtcatcctcctcaccgccgccgtccccggcctccaccccatcccctgcggcacccagtcctcctgccagggcccctccgagggccagatcgccttcctcctcatgggcctcgccctcctcgtcgtcggcgccggcggcatccgcccctgcaacctcgccttcggcgccgaccagttcaaccccaagtccgagtccggcaagaagggcatcaactccttcttcaactggtacttcttcaccttcaccttcgcccagatcatctccctcaccctcgtcgtctacatccagtccaacgtctcctggaccatcggcctctccatccccgtcggcctcatgttcctcgcctgcgtcatcttcttcgccggccacaagctctacgtcaaggtcaaggcctccggctcccccctcgccggcatcggccacgtcatcgccgccgccatcaagaagcgcggcctcaagcccgtcaagcagccctggatcgacctctacaaccacatcccccccaactacgccaactccaccctcaagtacaccgaccagctccgcttcctcgacaaggccgccatcatgacccccgaggacaagctcaactccgacggcaccgcctccgacccctggaagctctgcaccatgcagaaggtcgaggaggtcaagtgcatcctccgcgtcatccccatctggttcgcctgcgccatctactacctcgccatctccatgcagatgacctaccccgtcttccaggccctccagtccgaccgcctcctcggctccggcggcttcaagatccccgccgccacctacgtcgtcttcctcatgtccggcatgaccgtcttcatcatcatctacgaccgcgtcctcgtcccctccctcaagcgcgtcaccggcctcgacaccggcatcaccctcctccagcgcatcggcgccggcatcttcttcgccgtcctctccctcctcgtctccggcttcatcgaggagcgccgccgcaccttcgccctcacccgccccaccctcggctccgagccccgcaccggcgagatctcctccatgtccgccatgtggctcatcccccagctcgtcctcgccggcgtcgccgaggccttcgccgccatcggccagatggagttctactacaagcagttccccgagaacatgaagtccttcgccggctccatcttctacgtcggcggcggcgtctcctcctacctcgcctccttcctcatctccaccgtccaccgcaccaccgagcactcccccaccggcaactggctcgccgaggacctcaacaaggccaagctcgactacttctacttcatgctcaccggcctcatgttcgtcaacttcctctacttcctcctcatggcccgctggtaccgctacaagggcacccacgacgaggtctcctacgtcgtcgacaccgtcgacgaggagaccaagcagcaggacaagaactccgtctga

SEQ ID NO: 323 - protein, 636 aa, Arabidopsis thaliana
MKSRVILNHRDRRDKNHNNNNTNHYTQVDTMERKPLEVEPSTTTTNTDVVDSFEEEQRKIVYRGWKVMPFIIGNETFEKLGIIGTLSNLLVYLTSVFNLKSYTAATIINAFSGTINFGTFIAAFLCDTYFGRYKTLSVAVIACFLGSFVILLTAAIPSLHPVACGNKISCEGPSVGQILFLLMGLGFLVVGAGGIRPCNLAFGADQFNPKSESGKKGINSFFNWYFFTFTFAQIISLTAVVYIQSNVSWTIGLIIPVALMFLACVIFFAGDRLYVKVKASGSPLAGIARVIAAAIKKRGLKPVKQPWVNLYNHIPSNYANTTLKYTDQFRFLDKAAIMTPEEKLNSDGTASDPWKLCTLQQVEEVKCIVRVIPIWFASTIYYLAITIQMTYPVFQALQSDRRLGSGGFRIPAATYVVFLMTGMTVFIIFYDRVLVPSLRRVTGLETGISLLQRIGAGFTFAIMSLLVSGFIEERRRNFALTKPTLGMAPRTGEISSMSALWLIPQLTLAGIAEAFAAIGQMEFYYKQFPENMKSFAGSIFYVGAGVSSYLASFLISTVHRTTAHSPSGNWLAEDLNKAKLDYFYFMLTGLMVVNMAYFLLMARWYRYKGGNDEDITEIETNEEETKQQQLQDKNSV

SEQ ID NO: 324 - DNA, 1911 bp, Arabidopsis thaliana
  source 1..1911: mol_type = other DNA
atgaagtccagggttatcttgaaccacagagatagaagagataagaaccataacaacaacaataccaaccactacacccaagttgataccatggaaagaaaaccattggaagttgaaccatctactactaccactaacaccgatgttgttgactcattcgaagaagaacaacgtaagatcgtttacagaggttggaaagttatgccattcatcattggtaacgaaaccttcgaaaagttgggtatcataggcactttgtccaacttgttggtttacttgacttccgtgttcaacttgaagtcttatactgctgccaccattattaacgctttctccggtactattaacttcggtacttttattgctgccttcttgtgtgatacttacttcggtagatacaagaccttgtccgttgctgttattgcttgttttttgggttccttcgttattttgttgaccgctgctattccatcattgcatccagttgcttgtggtaacaagatttcttgtgaaggtccatccgttggtcagattttgtttttgttgatgggtttgggtttcttggttgttggtgctggtggtattagaccatgtaatttggcttttggtgccgatcaattcaacccaaaatcagaatctggtaagaagggcatcaactcatttttcaactggtactttttcaccttcaccttcgctcaaattatctccttgactgccgttgtttacatccagtctaatgtttcttggaccatcggtttgattattccagttgccttgatgttcttggcctgcgttattttctttgccggtgatagattatacgttaaggttaaggcttctggttctccattggctggtattgctagagttattgcagctgctattaagaagagaggtttgaagccagttaagcaaccatgggttaacttgtacaaccacattccatctaactacgctaacactactttgaagtacaccgaccaattcagattcttggataaggctgcaattatgaccccagaagaaaagttgaattctgatggtactgcttctgatccatggaagttgtgtactttacaacaagtcgaagaggttaagtgcatcgttagagttatcccaatttggttcgcttccaccatctattacttggccattactatccaaatgacgtacccagttttccaagccttgcaatctgatagaagattaggttcaggtggtttcagaattccagctgctacttatgttgttttcttgatgactggtatgaccgtgttcatcatcttctacgatagagttttggtcccatccttgagaagagttactggtttggaaactggtatctctttgttgcaaagaattggtgccggtttcactttcgctattatgtctttgttagtctccggtttcatcgaagagagaagaagaaatttcgctttgaccaagccaactttaggtatggctccaagaactggtgaaatctcttcaatgtctgctttgtggttgattccacaattgactttagcaggtattgctgaagcttttgctgctattggtcaaatggaattctactacaagcagttcccagagaacatgaagtcatttgctggttccattttttacgttggagctggtgtttcttcttacttggcttctttcttgatctccactgttcatagaactactgctcattctccatctggtaattggttggctgaagatttgaacaaggctaagttggactacttctactttatgttgaccggtttgatggttgtcaatatggcttacttcttgttaatggctagatggtacagatacaaaggtggtaacgatgaagatatcaccgaaatcgaaactaacgaggaagaaactaagcaacaacagttgcaagacaagaactccgtttga

SEQ ID NO: 325 - protein, 586 aa, Papaver somniferum
MEGNKASWSIADTVDYKGFPADKSKTGGWIPAVLILGIEICERLTTMGIAVNLVTYLGGTMHLSSATSANIVTDFMGTSFLLCLLGGFLADSYLGRYKTIAIFAVVQGLGTSMLALSTKLPQLRPPPCNENISPEKCEKANGIQMGVLYLSLYLVALGTGGLKACVSGFGTDQFDEKDKKEKTQMDYFFQRFFFFVSLGTLLAVTVLVYIQDHVGRSWAYGICSVSIFTAICIFLSGTKKYRYKKSFGSPAVQIFQVIAASIKKRKLEFPSSIELAYEDSSEDRRIQHTDQFRFLDKASIVATEDEKYKHLPPNPWQLCSVTKVEEVKMMIRLLPIWATTILFWTTYAQMMTFSVEQAATMHRSIGNFQIPAGSLTVFFVGAILITIAVYDQLVMPLWKKWKGTQGFTDMQRIAIGLMLSTLGMAFAAISEVKRLSVAKHAGDHIAANSTLPVSVFILIPQFIFVGSGEAFIYTGQLDFFITRAPKGMKSMSTGLFLTTLSLGFFVSSLLVSIIKAITGRNGGDGWLADNINDARLDYFYGLLAVLSLVNFGLFIWSAIWYKRNAPSKNSSVEMESIKTISYDEEK

SEQ ID NO: 326 - DNA, 1761 bp, Papaver somniferum
  source 1..1761: mol_type = other DNA
atggaaggtaacaaggcctcttggtctattgctgatactgttgattacaagggtttcccagctgataagtctaaaactggtggttggattccagccgttttgattttgggtattgaaatctgtgaaaggttgaccactatgggtattgctgttaacttggttacttacctaggtggtactatgcatttgtcatctgctacttcagctaacatcgttaccgattttatgggcacttctttcttgttgtgtttgctaggtggtttcttggctgattcttatttgggtagatacaagaccattgccattttcgctgttgttcaaggtttgggtacttctatgttggctttgtctacaaagttgccacaactaagaccaccaccatgtaacgaaaacatttctccagaaaagtgcgaaaaggccaacggtattcaaatgggtgtcttgtacttgtccttgtatttggttgctttaggtacaggtggtttgaaggcttgtgtttctggttttggtactgatcaatttgacgagaaggataagaaagaaaagacccagatggactacttcttccagagatttttcttcttcgtttctttgggcactttgttggctgttactgttttggtttacatccaagatcacgttggtagatcttgggcttatggtatttgctccgtttctatttttaccgccatctgcattttcttgtccggtacaaaaaagtacaggtacaagaagtcttttggttccccagctgttcaaatcttccaagttattgctgcctccatcaagaagagaaagttggaatttccatcctccattgaattggcctacgaagattcttctgaagatagaagaatccaacataccgaccagtttagattcttggataaggcttctatcgttgctacagaagatgagaagtacaaacacttgccaccaaatccatggcaattgtgttctgttacaaaagtcgaagaggtcaagatgatgattaggttgttgccaatttgggctaccactattttgttttggacaacctatgctcagatgatgaccttctctgttgaacaagctgctacaatgcataggtctattggtaactttcaaatcccagctggttctttgactgtttttttcgttggtgccatcttgattaccattgccgtttatgatcaactggttatgccattgtggaaaaagtggaaaggtactcaaggtttcaccgacatgcaaagaattgctattggtttgatgttgtccaccttaggtatggcttttgctgctatttctgaagtcaagagattgtctgttgctaaacatgccggtgatcatattgctgctaattcaactttgccagtctccgtttttatcttgatcccacaattcatcttcgtcggttctggtgaagcttttatctatactggtcaactggatttcttcatcactagagcaccaaaaggtatgaagtctatgtctactggtttgttcttgaccactttgtctttgggtttcttcgtgtcatctctgttggtttccattattaaggctatcactggtagaaatggtggtgatggttggttggctgataatatcaatgatgccagactggattacttttacggtttgttggcagttttgtccttggttaatttcggtttgttcatttggtccgccatttggtacaaaagaaatgctccatctaagaactcctccgtcgaaatggaatctattaagaccatctcttacgacgaagagaagtaa

SEQ ID NO: 327 - protein, 584 aa, Papaver somniferum
MAKNINDKPNLHILDDEEPTEASSTHGGRKRGGWITFPFITAAILAIQVGSSGWSANLTVFLIGQFNFMSIKAAQVGNIVAGTSSFLPIFGAILADSFFGNFSVIAVSSLFSLMGLILFMFTVTVPSLRPQQCAANVTGSSAGMCEPASTLQIAVLYTSITLSALGLGGSRFTVATMGADQFEKPKDQECFFNWHFFNFYVGLMIGVVGIVYIQDNIGWDRGVGICLAVNILGLVTFLAGKRYYRQVKTQGNPYKSLARVVVATILKRNLSISSASETFYHGFSDGVSMKSLSSPTSSFRFLNRAALKVDGDTNEDGSVAKEWRLCTVQQVEDFKTVIRIIPLWFSSFFLSTPIGIQSSLAVLQALRMDRHIGTHNFKIPAGSFLVFTLVATAISLTLIDRFLVPTYQKLIRRPLTPLQRIGVGHVLTVISMAASAIVERKRLSIVWSDGLTSSTTSVTMSALWLVIPLVLVGVGEAFHFPGQVALYYQEFPVSLHSTSTAMISLLVAVGFYLSTAMIDLVQRITGWLPNNINQGRLDNMFWLLVVIGVINFGYFIVCSLLYKYQNFNDQNPTKVDDKPRQGQN

SEQ ID NO: 328 - DNA, 1755 bp, Papaver somniferum
  source 1..1755: mol_type = other DNA
atggccaagaacatcaacgacaagccaaacttgcatatcttggatgatgaagaacctaccgaagcttcttctactcatggtggtagaaaaagaggtggttggattactttcccattcattactgctgctattttggctatccaagttggttcttctggttggtctgctaatttgaccgtttttttgatcggtcagttcaacttcatgtccattaaggctgctcaagttggtaatatcgttgctggtacttcttccttcttgccaatttttggtgcaattttggccgattctttcttcggtaacttctccgttattgccgtttcttctttgttctctttgatgggcttgatcttgttcatgttcactgttaccgttccatccttaagaccacaacaatgtgctgctaatgttactggttcttcagctggtatgtgtgaaccagcttctactttacaaattgctgtcttgtacacctccattaccttgtctgctttaggtttaggtggttctagattcactgttgctactatgggtgctgatcaatttgaaaagccaaaggatcaagagtgcttcttcaattggcatttcttcaacttctacgtcggtttgatgattggtgttgttggtatcgtttacatccaagacaatatcggttgggatagaggtgttggtatttgtttggccgttaacatcttgggtttagttacttttttggccggtaagaggtattacagacaagttaagactcaaggcaacccctacaaatctttggctagagttgttgttgctaccatcttgaagagaaacctgtctatttcttctgcctctgaaactttctaccatggtttttctgatggcgtgtccatgaagtctttatcttctccaacatcctccttcagattcttgaatagagctgctttgaaagttgatggtgacactaatgaagatggttccgttgctaaagaatggcgtttgtgtactgttcaacaagttgaggatttcaagaccgtcattagaattatcccactgtggttctcttcgttctttttgtctactccaatcggtatccaatcttctttggctgttttacaagccttgagaatggatagacatatcggtactcataacttcaagattccagctggttctttcttggttttcactttggttgctaccgctatttccttgaccttgatcgatagatttttggtcccaacctaccaaaagttgattagaaggccattgactccattgcaaagaattggtgtaggtcacgttttgacggttatttctatggctgcttctgctatcgttgaaagaaagagattgtctatcgtttggtctgatggtttgacctcttctactacttctgttactatgtcagctttgtggttggttatcccattggttttggttggtgttggtgaagcttttcattttccaggtcaagttgccttgtactaccaagaatttccagtttccttgcattctacctccactgctatgatttctttgttagttgctgtcggcttttacttgtctactgccatgattgatttggtccaaagaattactggttggctgccaaacaatattaaccagggtagattggacaacatgttctggttgttggttgttatcggtgttatcaacttcggttacttcatcgtctgttccttgttgtacaagtaccaaaacttcaacgatcaaaacccaactaaggttgacgataagccaagacaaggtcagaattga

SEQ ID NO: 329 - protein, 645 aa, Papaver somniferum
MVSALSDVEGEDIGTVVDFRGRPFDKSSTGGWLAAGFHSSVCLSAFLLNMVSAVSDVDGEDIGTVVDFRGRPFDKSSTGGWLAAGLILGSELAERICVVGISMNLVTYLVGDLHIPTAKSATIVTNFMGSLNLLALLAGFLADAKLGRYLTVAIFSTITAVGATLLTVATSIPSMRPPACDEVRRQHHECIQSTGSQLALLYAALYVIALGGGGIKSNVSGFGSDQFDVRDPKERKAMFFFFNRFYFCISLGSLFAVTVLVYIQDNVGRAWGYGISAGAMAIAVLVLFGGTPVYRLRTPQGSPLTVIWRVFYLASRKRKLPYPAHPSLLNEYHTAKVSHTERLRCLDKAAIVDANDNGQLENGAYNSWVVSTVTQVEEVKMVLKLIPIWSTCILFWTVYSQMTTLSVEQATFTNRHIGSFVFPSGSVSVFLTLTILIFTSLNEKVIVPIARRFTHTTQGITSLQRIGIGLVFAIMAMVASAIVEKQRRIIAVRDQIQISVFWLVPQYFLVGAGEGFAYVGQLEFFIREAPERMKSMSTGLFLTTVAMGFYVSSLLVSLVDKITHKGWIRSNLNKAKLDYFFWMLAVLGVLNFLVFLVFAMKHQYKVEKHYDKTMEGDNENELKDWKNNGSVIEEFEKKEAVEGVF

SEQ ID NO: 330 - DNA, 1938 bp, Papaver somniferum
  source 1..1938: mol_type = other DNA
atggtgtccgctttgtctgatgttgaaggtgaagatattggtactgttgttgactttagaggtaggccatttgataagtcatctactggtggttggttggctgctggttttcattcttctgtttgtttgtctgccttcctgttgaatatggtttctgctgtttcagatgtagatggtgaggacataggtacagttgtagattttcgtggtagacctttcgacaaatcttcaacaggtggttggctagcagcaggtttgattttgggttctgaattggctgaaagaatctgcgttgttggtatctctatgaacttggttacttacttggttggtgacttgcatattccaactgctaaatctgctactatcgtcactaatttcatgggcagcttgaacttgttggctttgttagctggttttttggctgatgctaaattgggtagatacttgaccgttgctattttctctactattactgctgttggtgctaccttgttgactgttgctacttctattccatctatgaggccaccagcttgtgatgaagttagaaggcaacatcatgaatgcatccaatctacaggttcacaattggccttgttgtatgctgccttgtacgttattgctttaggtggtggtggtatcaagtctaatgtttctggttttggttccgatcaattcgatgtcagagatcccaaagaaagaaaggctatgttcttcttcttcaaccgtttctacttctgcatctcattgggttctttgttcgctgttactgttttggtttacatccaagataacgttggtagagcttggggttatggtatttctgctggtgctatggctattgccgttttagttttgtttggtggtactccagtttacagattgagaactccacaaggttctccattgactgttatttggagagttttctacttggcctccagaaaaagaaagttgccatatccagctcatcccagcttgttgaatgaataccatactgctaaggtttcccacaccgaaagattgagatgtttggataaggctgctatcgttgatgctaatgataacggtcaattggaaaacggtgcttacaattcttgggttgtttctactgttacccaagttgaagaggttaagatggtcttgaagttgattccaatttggtctacctgcattttgttctggactgtctattctcaaatgaccaccttgtctgttgaacaagctactttcaccaacagacatatcggttcttttgttttcccatccggttctgtttctgttttcttgactttgacgatcctgatcttcacttccttgaacgaaaaagttatcgttccaatcgctagaagattcacccatacaactcaaggtattacctccttgcaaagaattggtatcggtttggttttcgccattatggctatggttgcttctgctattgtcgaaaagcagagaagaattatcgccgtgagagatcaaatccagatctctgttttttggttggtccctcaatacttcttagttggtgctggtgaaggttttgcttatgtcggtcaattagaattcttcatcagagaagctccagagcgtatgaagtctatgtcaactggtttgttcttgactacagttgctatgggtttctacgtgtcatctttgttggtttctttggttgataagatcacccacaaaggttggatcagatctaatttgaacaaggctaagctggactacttcttttggatgttggctgttttgggtgtcttaaacttcttggtgttcttggtctttgctatgaagcaccagtacaaagttgaaaagcactacgataagaccatggaaggtgataacgaaaacgaattgaaggactggaagaacaacggttccgttatcgaagaattcgaaaaaaaagaagccgtcgaaggcgttttctga

SEQ ID NO: 331 - protein, 579 aa, Papaver somniferum
MAEQRKVEVVMAEEDYCTQDGTVDYRNNPADKTKTGTWKACPFILGNECCERLAYYGMGTNLVTYLKVQLNQHNVVAVNNVSNWSGTCYVTPLLGAFLADAYLGRYWTIAIFSIIYVFGMTLLTLSASVHGLKPPCDSQGLNCHPNGLQTKICFVALYMIALGTGGIKPCVSSFGADQFDDTDEIEKKRKSSFFNWFYFTINIGALLAASVLVYIQTDVGWSWGFGIPAVAMAIAVVSFFSGTRLYRNQKPGGSPLTRICQVIVATLKKFRVEVPADKSLLYETSDEESVVKGSRKLDHTKTLSFLDKAAVEVQTDHIKGTVNSWSLCTVTQVEELKALIRLLPVWATGIIFATVYGQMGTLFVLQGSSMDISIGKFEIPSASLSIFDTLSVIFWVPVYDRVIVPFARKFTGHKNGFTQLQRMGIGLFISIFAMVAAAILELYRLRLVKKHDYYDLAHVPMSIFWQIPQYFIIGCAEVFMFIGQLEFFYEQAPDAMRSLCSALSLTTVALGNYLSTFLVTIVTDISTKNGKPGWIPDNLNRGHLHYFYFLLAVLSVLNLGAYLLVAKWYTYKKAVGTLR

SEQ ID NO: 332 - DNA, 1740 bp, Papaver somniferum
  source 1..1740: mol_type = other DNA
atggccgaacaaagaaaggttgaagttgttatggctgaagaagattactgtacccaagatggtactgttgactacagaaacaatccagctgataagactaagactggtacttggaaagcttgcccattcattttgggtaacgaatgttgtgaaagattggcctattatggtatgggtacaaacttggttacctacttgaaggtccaattgaaccagcataatgttgttgccgttaacaacgtttctaactggtctggtacatgttacgttactccattattgggtgcttttttggctgatgcttatttgggtagatactggaccattgccattttctccattatctacgttttcggcatgacgttgttgactttgtctgcttctgttcatggtttgaaaccaccatgtgattcccaaggtttgaattgtcatccaaatggcttgcaaactaagatttgtttcgttgccttgtacatgatcgctttaggtactggtggtattaagccatgtgtttcttcatttggtgccgatcaatttgatgataccgacgaaattgagaagaagaggaagtcctcttttttcaactggttctacttcaccattaacatcggtgctttgttagctgcttcagttttggtttacatccaaactgatgttggttggtcttggggttttggtattccagctgttgctatggctattgctgttgtttcatttttctcaggcactaggttgtacagaaatcaaaaaccaggtggttctccattgaccagaatttgtcaagttatcgttgctaccttgaagaagttcagagttgaagttccagcagacaagtctttgttgtacgaaacttctgatgaagagtccgttgttaagggttctagaaaattggatcataccaagaccttgtccttcttggataaggctgctgttgaagtacaaaccgatcatattaagggtactgtcaactcttggtctttgtgtactgttactcaagtcgaagaattgaaggccttgatcagattattgccagtttgggctactggtattatcttcgctactgtttatggtcagatgggtactttgttcgtattgcaaggttcctccatggatatttctatcggtaagttcgaaattccctccgcctctttgtctattttcgatactttgtccgttatcttctgggttccagtttacgatagagttattgtcccattcgctagaaagttcactggtcataagaatggtttcacccaattgcaaagaatgggtattggtctgttcatttctatctttgctatggttgctgctgccattttggagttgtatagattgagattggtcaaaaagcacgactactacgatttggctcatgttccaatgtccattttctggcaaattccacagtacttcattatcggttgtgccgaagttttcatgttcatcggtcaattggaattcttctacgaacaagctccagatgctatgagatctttgtgttctgctttgtctttgactactgttgccttgggtaattacttgtctaccttcttggttactatcgtcactgatatctctaccaagaatggtaaaccaggttggattccagacaatttgaatagaggtcacttgcactacttctactttttgttggctgttctgtccgttttgaatttgggtgcatatttgttggttgctaagtggtacacttacaagaaagctgttggtactttgaggtaa

SEQ ID NO: 333 - protein, 596 aa, Papaver somniferum
MGVLSSVNGDANDHYEVPLLTNSTTDGHGVQKNTTSSSIDFVEGVVDYKGEKVFDRLKFGGWKSASFLILLSTADSFVNVGMILNLISYLTGPLQQPTLTAAKNINILAGVTWMVPLFTSLFVDCFLGQLRTILFSCLIYITGFGFLTLSVLHPYLKQSDCVNKILCNSPSSFQVLFFYMSLYIASVGGSGFRLCAQAFGADQFDETSSDECKSKSSFFNWWYFAASIGTILSQLILNYIQDNLSWAIAFGISGIVMMVALTVFLLRMHTYRYNVKKNNSHAILDIIRVYVVAARNWRSKTSIDHEQAIGTAHQIPFGSHQFKFLDKALIDFSNNPVVSRKSCIACSFSQVEDAKVLLQLVPIWITCLIYVVVSSQSMTFFTKQSITLDRSIGPNFQIPAASIYILVTLSIAFFVPIYDRLFIPLARIVTGNPNGITTLQRIGCGIFFSTTSMVVAAVIEKKRLQAALNFGLIDNPNATIPMSVLWLVPQYVLTGFESVFTFIGLQEFFYDQSPKGLKSVGLSLFYSMCGIGSFLSGILITIIERVTCGDGSYGWFANNLNQAHLDYFYWLLAGLSTLQLVIFIYFSNSYRYRRGT

SEQ ID NO: 334 - DNA, 1791 bp, Papaver somniferum
  source 1..1791: mol_type = other DNA
atgggcgttttgtcctctgttaatggtgatgctaacgatcattacgaagttcctttgttgactaactctactactgatggtcatggtgtccaaaagaataccacctcttcttccattgatttcgttgaaggtgttgtcgattacaagggtgaaaaggttttcgacagattgaaatttggtggttggaagtctgcctccttcttgattttgttgtctactgctgattccttcgttaacgttggtatgatcttgaacctgatctcttatttgactggtccattgcaacaacctactttgactgctgctaagaacattaacattttggctggtgttacttggatggtccctttgtttacttctttgttcgttgattgcttcttgggtcaattgagaaccattttgttcagctgcttgatctacattactggctttggtttcttgaccttgtccgttttacatccatacttgaagcaatccgattgcgtgaacaagattttgtgtaactctccatcctcattccaggtcttgtttttctacatgtccttgtacattgcttccgttggtggttctggttttagattgtgtgctcaagcttttggtgctgatcaatttgacgaaacctcttctgatgagtgcaagtccaaatcttcttttttcaactggtggtacttcgctgcttccattggtactattttgtcccagttgatcctgaactacatccaagataatttgtcctgggctattgcctttggtatttctggtatagttatgatggttgccttgaccgttttcttgttgagaatgcatacttacaggtacaacgtcaaaaagaacaactcccatgccatcttggatatcatcagagtttatgttgttgccgccagaaattggagatctaagacttctattgatcacgaacaagctattggtactgcccatcaaattccatttggttcccatcaattcaagttcttggataaggccttgatcgacttttctaacaacccagttgtttcccgtaagtcttgtattgcttgttcattctcccaagttgaagatgccaaagttttgttacaattggtcccaatttggatcacgtgtttgatctacgttgttgtctcttctcaatcgatgactttcttcaccaagcaatccattaccttggacagatctattggtccaaacttccaaattccagctgcctctatctacattttggttaccttgtctatcgccttcttcgttccaatctacgataggttgtttattccattggctagaatcgttactggtaacccaaatggtattaccaccttgcaaagaattggttgcggtattttcttctccactacctctatggttgttgctgctgttattgagaaaaagagattgcaagctgctttgaacttcggtttgattgataatccaaacgccaccattccaatgtctgttttgtggttggttccacaatatgttttgaccggtttcgaatctgttttcacctttattggcttgcaagagttcttctacgatcaatctccaaagggtttgaagtctgttggtttgtctttgttctactccatgtgtggtattggctcattcttgtccggtattttgattaccattatcgaaagggttacctgcggtgatggttcttatggttggtttgctaacaacttgaatcaagcccatttggactacttctactggttattggctggtttgtcaaccttgcaattggtcattttcatctacttctccaactcctacagatacagaaggggtacttaa

SEQ ID NO: 335 - protein, 565 aa, Rhizopus microsporus
MNEEKQDSIIETNSKHNNFFETYNEEYPEPTEEDWKSLPEVSDAIPKAAFLVILIEFCERFTYYGLSGPFQNYIQNPPPPSYPASLPGAMGKGQQTATALNTFFTFWCYITPILGAVIADQFWGKYRTILVFSIIYLLGLAILTLTSIPPAIASGASFPGYIVAIIIVGLGTGGIKSNVSPLVAEQYRSKSAYVKTLKNGKRVIVTPQATYQKIFNFFYWGINIGSLSAIATTELEKNVGFWPAFVLPTLMFIPCIIIVILGRNQYIQNPPRGSVFVEAGRLFWLSWKVKGGLDACKPSNLAREYPEYAIKATWDDVFVDELKRTLKACVIFCWYPIYWLCYSQMTNNLVSMAGTMLTGNVPNDIMQNIDPIALIIIIPIMDSIVYPGLRRLGLPMRPIARITCGFFFAAAAMGYTAGIQSMVYKSAPYYDHPEGRQNWISAAYLIPSYVLIAISEIFASITGMEYAYKKAPQSMKSIVMALFLLTNCFASILAFALVSVAVDPKLEWMYTGISAAMFFCTIMFYICHHKADDTDVEEDAIVRDNMAQKATDDEIVTEYELEKNR

SEQ ID NO: 336 - DNA, 1698 bp, Rhizopus microsporus
  source 1..1698: mol_type = other DNA
atgaacgaagagaagcaggactccatcatcgaaactaactctaagcacaacaatttcttcgaaacctacaacgaagaatacccagaacctactgaagaagattggaaatctttgccagaagtttctgacgctattccaaaagctgctttcttggttatcttgatcgaattctgtgaaaggttcacctactatggtttgtctggtccattccaaaactacattcaaaatccaccacctccatcttatccagcttcattgccaggtgctatgggtaaaggtcaacaaactgctactgctttgaacacctttttcactttctggtgttacatcaccccaattttgggtgctgttattgctgatcaattctggggtaagtacagaaccattctggttttctccattatctacttgttgggtttagccattttgaccttgacttctattccaccagctattgcttcaggtgcttcttttcctggttatatcgttgccattatcatcgtcggtttaggtactggtggtatcaagtctaatgtttcaccattggttgctgaacagtacagatctaaatctgcttacgttaagaccttgaagaacggtaagagagttatcgttactccacaagctacctaccaaaagatcttcaactttttctactggggcatcaacatcggttctttgtctgctattgctactaccgaattggaaaagaatgttggtttttggccagctttcgttttgccaactttgatgtttattccctgcatcatcatcgtcatcttgggtagaaatcagtacattcagaacccacctagaggttctgtttttgttgaagctggtagactgttttggttgtcttggaaagtaaaaggtggtttggatgcttgtaagccatctaatttggctagagaatatccagaatacgctattaaggctacctgggatgatgttttcgttgacgaattgaagagaaccttgaaggcttgtgttatcttctgttggtatccaatctactggttgtgctattctcaaatgaccaacaacttggtttctatggctggtactatgttgactggtaatgttccaaacgacatcatgcaaaacattgatccaattgccttgattatcatcatccccatcatggattctatcgtttatccaggtttgagaaggttaggtttgccaatgaggccaattgctagaattacttgtggttttttctttgctgctgctgcaatgggttatactgctggtattcaatccatggtttacaagtctgctccttactatgatcatccagaaggtagacaaaactggatttctgctgcttatttgatcccatcctacgttttgattgccatctctgaaattttcgcctctattaccggtatggaatacgcttacaaaaaggctccacaatccatgaagtctatcgttatggctttgttcttgttgaccaactgcttcgcttctattttggcttttgctttggtttccgttgctgttgatccaaagttagaatggatgtacacaggtatttccgctgctatgttcttctgtaccattatgttctacatctgccatcataaggctgatgatactgatgtagaagaagatgccatcgttagagataacatggctcaaaaagctaccgatgacgaaatcgttactgaatacgaattggagaaaaacaggtaa

SEQ ID NO: 337 - protein, 580 aa, Rhizopus microsporus
MSIKEKDFVKKDVFENAYENASEEHIEPTESDWKVLREVSDSIPKAAYLVIVVEFCERFTYYGLTGPFQNYIQNPDPGHYPAEYPGAMGRGQQTATALTTFFQFWCYITPVIGAIIADQYLGKYKTILIFAIIYFIGLILLTLTSIPSAIATGATFPGFIVSLIIIGLATGGIKSNVSPLVAEQYKNTKPYIKTIRKKVFSNHSVDEGDHAVNHQGDDEVRVIVSPQATYQKLFNMFYWGINLGSLASVTTVVLEKQVGFWAAYLLPTLVFIPGILIVFFGKKQYVLTPPRGSIFIETFKVIRYSWKYGFEGCKPSNLRQVNPELASKATWDDIFIDELRRTFRACVVFCWYPIYWLCYSQMTNNMVSMTATMQTGSVPNDIMQNINPLTLVIFIPIMDRIVYPGLRRMGLHLGPMIRITLGFFFAACAMGYAAGIQSYIYSKPPYYDHPTGNGKNDVSAGLIIPAYVLIGISEIFASITGLEYAYRKAPEKMKSLVMAIFLLTNCFGSILGFALVSVAEDPKLKWMYTGIAIAMGVCAPLFYFCHGSNDKTDMQEDAIQRSAEKEEVVVEYEVEAKPTV

SEQ ID NO: 338 - DNA, 1743 bp, Rhizopus microsporus
  source 1..1743: mol_type = other DNA
atgtccatcaaagagaaggacttcgtcaaaaaggacgtttttgaaaacgcttacgaaaacgcctccgaagaacatattgaacctactgaatctgattggaaggtcttgagagaagtttccgattctattccaaaagctgcctacttggttatcgttgttgaattctgtgaaaggttcacctactatggtttgactggtccattccaaaactacattcaaaatccagatccaggtcattacccagctgaatatccaggtgctatgggtagaggtcaacaaactgctactgctttgactacttttttccaattctggtgctacatcaccccagttattggtgctattattgccgatcaatatctgggcaagtacaagaccattttgattttcgccatcatctacttcatcggcttgatcttgttgacgttgacatctattccatctgctattgctacaggtgctacttttccaggttttatcgtttccttgatcattattggtttggctaccggtggtatcaagtctaatgtttctccattggttgctgagcagtacaaaaacactaagccttacattaagaccatccgtaagaaggttttctccaaccattctgttgatgaaggtgatcatgctgttaaccatcaaggtgatgatgaagttagagtcatcgtttctccacaagctacttaccaaaagttgtttaacatgttctactggggtatcaacttgggttctttggcttctgttactaccgttgttttggaaaagcaagttggtttttgggctgcttatttgttgccaaccttggtttttattccaggcatcttgatcgttttcttcggtaagaaacaatacgttttgactccaccaagaggctccattttcattgaaaccttcaaggtcattaggtactcttggaagtatggtttcgaaggttgtaagccatctaacttgagacaagttaatcctgaattggcttctaaggctacttgggatgatattttcatcgacgaattgagaagaaccttcagagcttgtgttgttttctgttggtatccaatctactggttgtgctattctcaaatgaccaacaacatggtttctatgactgctactatgcaaactggttctgttccaaacgatatcatgcaaaacattaacccattgaccttggtcatcttcatcccaattatggatagaatcgtttacccaggtttaagaagaatgggtttacatttgggtccaatgatcagaattaccttgggttttttctttgctgcttgcgctatgggttatgctgctggtattcaatcttacatctactctaagccaccttactacgatcatccaactggtaatggtaagaacgatgtttctgccggtttgattattccagcttatgttttgatcggtatctccgaaattttcgcctctattactggtttggaatacgcttatagaaaggccccagaaaagatgaagtctttggttatggctatcttcctgttgactaactgcttcggttctattttgggtttcgctttagtttccgttgctgaagatccaaaattgaagtggatgtacaccggtattgctattgcaatgggtgtttgtgctcctttgttttacttttgccatggttctaacgataagaccgacatgcaagaagatgccattcaaagatctgccgaaaaagaagaggttgtcgttgaatatgaagttgaagctaagccaaccgtctga

SEQ ID NO: 339 - protein, 685 aa, Rozella allomycis
MSEDSDKLLEAGGPTEIMGSDNHSSDSLPKSVFFIIGNEFCERFSYYGMRAILWTYLAQFLRFPDGMATSIYHSFVMLAYFFPLFGAILADSYWGKYRTILTLSIVYIIGNIVMAVTAFPSVAGNPPQPYGALIGLLLLAIGTGGIKPCVVSFGGDQFDASQVKQSALFFSLFYFSINAGSAFIIGNEFCERFSYYGMRAILWTYLAQFLRFPDGMATSIYHSFVMLAYFFPLFGAILADSYWGKYRTILTLSIVYIIGNIVMAVTAFPSVAGNPPQPYGALIGLLLLAIGTGGIKPCVVSFGGDQFDASQVKQSALFFSLFYFSINAGSFFSMIITPWIRENVQCFGSDQCFPLAFGLPAILLIVATCLFVIGSKSYKHRPLSGNVSILMFNVRRKRKREESEAELPNHWLYYAYPLFDRKTIDEIKSVFSVLIIFAPLSVFWMIYDQQGSRWTAQVWQMNHKASIFGSTISIPPESMQVWNTVFILIMIPLFQKLIFPAVRKFGIKLTALRKIGAGLIIALVAFLMSAYLQFEIDNTMTGPRLSDASQCNDNCISILWQIPQYIVLTCGEVLVSITGLEFAYSQAPSSMKSICQSGWLLAIALGNLLVILFNLFDPIGNIPHHEMWTSVMYSGILVLAILLYIRICKNYKYKSASNEGYVSVPTSVMYSGYVSVPDEEIEEAT

SEQ ID NO: 340 - DNA, 2058 bp, Rozella allomycis
  source 1..2058: mol_type = other DNA
atgtccgaggattccgacaagttgttggaagctggtggtccaactgaaattatgggttctgataaccactcctctgattctttgccaaagtccgttttcttcatcatcggtaacgaattctgcgaaaggttttcttactatggtatgagagctatcttgtggacttacttggctcaatttttgagattcccagatggtatggctacctctatctaccattcttttgttatgttggcctacttcttccctttgttcggtgctattttggctgattcttattggggtaagtacagaaccattctgaccttgtctatcgtctacattatcggtaatatcgttatggccgttactgcttttccatctgttgctggtaatccaccacaaccatacggtgctttgattggtttgttgttgttggctattggtactggtggtattaagccatgtgttgtttcttttggtggtgatcaattcgatgcctctcaagttaagcaatctgctttgttcttctccctgttctacttctctattaacgctggttccgctttcattattggtaatgagttctgtgagcgtttctcctattacggaatgagagcaattctgtggacatacctagcacagttcttaagatttccagacggaatggcaacttccatctatcatagtttcgtaatgctggcttacttctttccattatttggtgcaatcttggccgatagttactggggaaagtatagaactatcttgacgctgtccatcgtgtacatcattggtaacattgtcatggctgttacagcatttccaagcgttgcaggtaaccctcctcaaccttatggtgcactaataggtttgttattattggcaataggaaccggtggtatcaaaccttgcgttgttagcttcggaggtgaccaatttgatgctagtcaagtaaaacaaagcgccctgtttttcagcctgttctatttttcaatcaacgccggttctttcttctccatgattattactccatggatcagagaaaacgtccaatgttttggttctgatcaatgtttcccattggcttttggtttgccagctattttgttgatcgttgctacttgcttgttcgtcattggttccaagtcttacaaacacagaccattgtctggtaacgtgtccattttgatgttcaacgttagaagaaagcgtaagagggaagaatctgaagctgaattgccaaatcattggttgtattacgcctatccactgttcgatagaaagaccattgacgaaatcaagtccgtgttctccgttttgattattttcgctccattgtccgtcttttggatgatctatgatcaacaaggttctagatggactgctcaagtttggcaaatgaaccataaggcttctattttcggttccaccatttctattccaccagaatctatgcaagtttggaacaccgttttcatcttgatcatgattcccttgttccagaagttgattttcccagctgttagaaagttcggtattaagttgactgccttgagaaaaattggtgccggtttgattatagctttggttgcttttttgatgtccgcctacttgcaattcgaaatcgataacactatgaccggtccaagattgtctgatgcttctcaatgtaacgataactgcatctccattttgtggcaaattccacagtacatcgttttgacttgtggtgaagttttggtttccattaccggtttggaattcgcttattctcaagctccatcttccatgaagtctatttgtcaaagtggttggttgttggcaatcgctttgggtaatttgttggtcatcttgttcaacttgttcgacccaattggtaatatcccacatcacgaaatgtggacctctgttatgtattccggtattttggttttggccattctgttgtacattaggatctgcaagaactacaagtacaagtccgcttctaatgagggttatgtttctgttccaacttccgttatgtacagcggttacgtttcagtaccagacgaagaaattgaagaagctacctga

SEQ ID NO: 341 - protein, 681 aa, Catenaria anguillulae
MAPPQPPSPPSAKASPSPLSSHHHFSESSPLLGSSAPATMYTPVPTSSSRSHHHAQAQAQGTSSSSASASASASHPRKRPPPLLATHSQASASSSSSKLFNSSTDACFSPTPILHTNDSHHGSADPLLSSDLIPDSHAVLTDAERDWLAQDTRIPKSIAFIVGNEFCERFTFYGIKSVLLIYLTRYLRIESNSATAAVHAFNMFAYTATLLGGTLSDGYLGRFRTIIYLSLVYCIGNLVLSLTAVPGVMPVNPSTGAPSPWGALLGLTLLALGTGGIKPCVSAFGGDQFHPAQVAAISIFFSLFYAAINSGSLLSMFITPILRSTSCFGRQDCFSLAFGLPSVLMLVSTAIFVAGRKYYRMSPPEGNVLGRVFTAIGAARRERARVGHDENVDHWLDYAALDPEFAGSSGAKFLADVKQLLSVVWVFLPLPLFWTLYDQQGSRWTSQALLMQSTLSVFGLFDVTVKPDQMQVTNALLILSFIPLFQRFVYPNVKWLDGKPLRRMALGMVLTGVSFVMAGTLQYAIDAGVYASMENGQLVEVTDHAARAKLAEQGTLVCLSGCVPIVWQVPQYIVITAGEILFSITGLEFAYSQSPPALKSVCQAAWQMTVAVGNLLVIVIAESRMFDAAPELFFFAGCIFVAAVVFVVMASGYVKSGHARPMSPGPLDAGRQGPEDEEVDM

SEQ ID NO: 342 - DNA, 2046 bp, Catenaria anguillulae
  source 1..2046: mol_type = other DNA
atggctccaccacaaccaccatctccaccatcagctaaagcttctccatctccattatcttcccatcatcatttctctgaatcttctccattgctaggttcttcagctccagctactatgtatactccagttccaacatcttcctccagatctcatcatcatgctcaagctcaagcccaaggtacttcttctagttctgcttcagcttctgcatctgcttctcatccaagaaaaagaccaccaccattattggctactcattctcaagcttcagctagctcatcttcttcaaagttgttcaactcttctaccgatgcttgtttttctccaactccaatcttgcataccaacgattctcatcatggttctgctgatccattattgtcctctgatttgatcccagattctcatgctgttttgactgatgctgaaagagattggttggctcaagataccagaattccaaagtctattgctttcatcgtcggtaacgaattctgtgaaagattcactttctacggcatcaagtccgttttgttgatctacttgactaggtacttgaggatcgaatctaattctgctactgctgctgttcatgcttttaacatgtttgcttacaccgctactttgctaggtggtactttgtctgatggttatttgggtagattcaggaccatcatctacttgtctttggtttactgcatcggtaacttggttttgtctttgactgctgttccaggtgttatgccagttaatccatctactggtgctccatcaccatggggtgctttgttgggtttgactttgttggctttaggtactggtggtattaagccatgtgtttctgcttttggtggtgatcaatttcatccagctcaagttgctgccatcagcattttcttttctttgttttacgccgccatcaactctggttctttgttgtctatgttcatcaccccaattttgagatctacctcttgttttggtagacaggattgcttctctttggcttttggtttgccatctgttctgatgttggtttctactgctatttttgttgctggcagaaagtactacagaatgtctccacctgaaggtaacgttttaggtagagtttttacagctattggtgctgccagaagagaaagggctagagttggtcatgacgaaaatgttgatcattggttggattacgctgctttggatccagaatttgctggttcatctggtgctaagtttttggctgatgtcaaacagttgttgtccgttgtttgggtttttttgccattgccattattctggaccttgtacgatcaacaaggttctagatggacttcacaagctttgttgatgcaatctaccttgtctgttttcggtttgttcgatgttactgttaagccagatcaaatgcaagttaccaacgccttgttaatcttgtccttcattcctttgttccagagattcgtttacccaaacgttaagtggttggatggtaaaccattgagaagaatggcattaggtatggttttgaccggtgtttcttttgttatggctggtacattgcaatacgctattgatgctggtgtttacgcttctatggaaaacggtcaattggttgaagttactgatcatgctgctagagctaaattggctgaacaaggtacattggtttgtttgtctggttgtgttccaatcgtttggcaagttccacagtacatcgttattactgctggtgaaatcttgttctccattactggtttggaatttgcctactctcaatctcctccagctttgaaatctgtttgtcaagctgcttggcaaatgactgttgctgttggtaatttgttggttatcgttatcgccgaatccagaatgtttgatgctgctccagaattattcttcttcgctggttgtattttcgttgccgctgttgtttttgttgtaatggcttctggttacgttaagtctggtcatgctagaccaatgtcaccaggtccattggatgctggtagacaaggtcctgaagatgaagaggttgatatgtga

SEQ ID NO: 343 - protein, 477 aa, Absidia repens
MLGAIVADQYIGRYKTILVFSTVYLIGWIILTCTSIPSALEAGAGFPGYVVSLVVIGLGTGGIKGIVSPLCADQFKYDHDYVKELPSGEKVLVDYSLTIQRLYNWFYWAINIGSLVGGVVCPLLELNVDFWAAYLLPTIALLVSIMVFVAGTKLYYRPKPTGSIILKAFSVIGQAWKQKALPENKEARKQCKDFMDFAKRDSGMTNTAPWTPEMTAKAAHWDDQFVDELKQAIMACKIFVPLSIYWVCYNNLSNNLISQAAVMARPAGLPNNIMNNFDPIALLIFIPIVDIIIYPALRKHKINFFPQQRITAGFFIGALSMVYAAVVQHYIYMDPLFIETGDSSNVSVFIQIPCYVLIAFSEIFASITSIEYAYTHAPKSMKSLVSALSLWPNCVAALISLAISPAAQDPNMVWVYTGVACGAFACGILYYWLFKHYDDIDEEYRVKKLTDQQHQPTTALELDPMTMDTPWDKDAKL

SEQ ID NO: 344 - DNA, 1434 bp, Absidia repens
  source 1..1434: mol_type = other DNA
atgttgggtgctatagttgccgatcagtacattggtagatacaagaccattctggttttctccaccgtttatttgattggctggattattttgacctgcacctctattccatctgctttggaagctggtgctggttttccaggttatgttgtttctttggttgtcatcggtttaggtactggtggtattaagggtatagtttctccattgtgtgccgaccaattcaagtatgatcatgactacgtaaaagagttgccatctggcgaaaaagttttggttgattactccttgaccatccagagattatacaattggttttactgggccatcaacatcggttctttagttggtggtgttgtttgtcctttgttggaattgaatgttgatttctgggctgcttacttgttgccaactattgctttgttggtttccatcatggttttcgttgctggtactaagttgtactatagaccaaaacctaccggctccattatcttgaaagccttttctgttattggtcaagcctggaagcaaaaagctttgccagaaaacaaagaagccagaaagcaatgcaaggatttcatggattttgccaaacgtgattctggtatgactaatactgctccatggactccagaaatgactgctaaagctgctcattgggatgatcaattcgttgatgaattgaagcaagctattatggcctgcaagattttcgttccattgtctatctattgggtctgctacaacaacctgtccaacaacttgatttctcaagctgctgttatggctagaccagcaggtttaccaaacaacattatgaacaacttcgatccaatcgccttgttgatcttcattccaatcgttgacattatcatctacccagctttgagaaagcacaagatcaatttctttccccaacaacgtattaccgccggttttttcattggtgctttgtctatggtttacgctgctgttgttcaacactacatctatatggatcccttgttcattgaaaccggtgactcttctaatgtctccgtgtttattcaaatcccatgctacgttttgatcgccttctctgaaattttcgcctccattacctctattgaatacgcttatactcatgccccaaagtccatgaagtctttggtttctgctttatctttgtggccaaattgtgttgccgctttgatttctttggctatttcaccagctgctcaagatccaaatatggtttgggtttacactggtgttgcttgtggtgctttcgcttgtggtatcttgtattactggttgtttaagcactacgacgatatcgatgaagagtacagagttaagaagttgaccgatcaacaacatcagccaacaactgctttagaattggatcctatgactatggatactccatgggacaaagatgctaagttgtga

SEQ ID NO: 345 - protein, 613 aa, Stemphylium lycopersici
MAANTNVKASLEITKGATMTTDPIAVDTDATSSNDDHTNLLGPAPTEEEWDTLPRVAGSIPWQAWTVAAVEFVERFSYYGTSAVFVNFIQKPLPPGSTTGAGFLKSSGSGALDMGQRASTGLTMFNQFWSYITPLGGAWLADEYWGRYNTIQYSNLVALIGHIVLILSAIPPVIVKPNAAIGVFAVGLVIMGIGTGGFKSNISPLIAEQYKDQRAYVRVRKNGQREIVDPATTTARIYIYFYFLINCGSICGSLAMVYSEHFVGFWLSFTLPTICYLLCPIILITMKKHYKLSPPTGSVMGKAFKLIRFGIKKSPRKNTLKDEGFWDRVKPSALRASGQVVPDWMTFDDAWVDEVKRGVLACKVFLWYPLYWLAYNQMTGNLVSQANTMNLGNVPNDVVSNLNPIFIVILIPIMDFLIYPGLRKVGIVLSPIKKITAGFALSSFAMVSACVTQYYIYKMSPCGDNINALSEVRDDCHADITVWVQVVPYGLIGFSEIMASITKLEYAYTKAPNNMKSTIQAIALSTSAVSAALGQALVSLSEDPLLVWNYGAVAVIAMAGGVGFYLTFRKADAQEDAMNNLKESTYQGGREIGDAENVETLSIRNEKNEKGEL

SEQ ID NO: 346 - DNA, 1842 bp, Stemphylium lycopersici
  source 1..1842: mol_type = other DNA
atggctgctaataccaacgttaaggcctctttggaaattactaagggtgctactatgaccactgatccaattgctgttgatactgatgctacctcttctaacgatgatcataccaatttgttgggtccagctccaactgaagaagaatgggatactttgccaagagttgctggttctattccatggcaagcttggactgttgctgctgttgaatttgttgaaaggttctcttactacggtacttccgctgttttcgttaacttcattcaaaaaccattgccaccaggttctactactggtgctggttttttgaaatcttctggttctggtgctttggacatgggtcaaagagcttctactggtttgactatgttcaatcagttctggtcttacatcactccattaggtggtgcttggttggctgatgaatattggggtagatacaacaccatccagtactctaatttggttgccttgattggtcacatcgtcttgattttgtctgctattccaccagttatcgttaagccaaatgctgctattggtgtttttgctgttggtttggttattatgggtattggtactggtggtttcaagtccaatatttccccattgattgctgaacagtacaaggatcaaagagcctacgttagagttagaaagaatggtcagagagaaatcgttgatccagctactactactgctagaatctacatctacttctatttcttgatcaactgcggttccatttgtggttctttggctatggtttactccgaacattttgttggtttctggttgtcttttaccttgccaaccatttgttatctgttgtgcccaattatcctgatcactatgaagaagcactacaagttgtctccaccaactggttctgttatgggtaaagctttcaagttgatcaggttcggtattaagaagtccccaagaaagaacaccttgaaggatgaaggtttttgggatagagttaagccttctgctttgagagcttctggtcaagttgttccagattggatgacttttgatgatgcttgggttgatgaagtcaagagaggtgttttggcttgtaaggtttttttgtggtatcccttatactggttggcttacaatcaaatgactggcaacttggtttctcaagctaacactatgaatttgggtaacgttccaaacgacgttgtctctaacttgaacccaattttcatcgtcatcttgatccccatcatggactttttgatatacccaggtttgagaaaggttggcatagttttgtctccaatcaagaagattacagccggttttgctttgtcctcatttgctatggttagtgcttgtgttactcagtattacatctacaagatgtccccatgtggtgataacattaacgctttgtctgaagtcagagatgattgccatgctgatattactgtttgggtacaagtagttccatacggtttgatcggtttctctgaaattatggcctctatcaccaaattggaatacgcttatacaaaggccccaaacaacatgaagtctaccattcaagctattgccttgtctacatctgctgtttctgctgctttaggtcaagctttggtttctttatctgaagatccactgttggtctggaattatggtgctgttgctgttattgctatggctggtggtgtaggtttttacttgacttttagaaaggctgatgctcaagaggatgccatgaacaatttgaaagaatctacttaccaaggtggtcgtgaaattggtgatgctgaaaatgttgaaaccctgtccattagaaacgaaaagaacgaaaaaggcgagctgtga

SEQ ID NO: 347 - protein, 553 aa, Aspergillus oryzae
MHSVTPVMPESTRTPDVPDLQIQSTVTHSDIPKPLQADQAYEPGLRRVPDRIPWVVGLIIVVELGERFTYFGLSGPLQNYIKNPYVPGADLPGALGKGQAIASALGNFFKFWAYASTIVGAVIADQYVGKFKAIVIASGIYIVGLTILVATATPAAINGGSAFGGLIASMVIIGLGTGGIKANVTPFCAEQYQKGSAFVKTLKSGERVVVDPELTVERMFMWYVPSFLIPLMWVNIKQYRVIVLAAVVFLCSSNLYIKTKPQGSPIVETARTVYVAISERGFESAKPSSLSQRGRLEKYSVASSANYTDQSVDGVKKGIRACKLFLLFPFYFICWVQIWNNLISQAGQMALHGTPNDLLQNLDPIALIIFIPLLDLVVYPTLRHFKIDFRPELKITVGFFMASMSMVYASVLQHYIYISPAQSIHVWVQTPAYVLVAFSEAFVVVTGLEIAYTNAPESLRSLVSSLFWLTIGVAAAICIGLAPVSQDPYLVWMYGSLAIVGFVAGILFYVLYGRTSKQPVPVLDSVETTSGQREDEEAQIESGKRMVVTAKDS

SEQ ID NO: 348 - DNA, 1662 bp, Aspergillus oryzae
  source 1..1662: mol_type = other DNA
atgcactctgttactccagtcatgccagaatctactagaactccagatgttccagacttgcaaattcaatctactgttacccattccgacattccaaaaccattgcaagctgatcaagcttatgaaccaggtttgagaagagttccagatagaattccatgggttgttggtttgatcatcgttgttgaattgggtgaaagattcacctactttggtttgtctggtccattgcaaaactacatcaagaatccatacgttccaggtgctgatttgccaggtgctttaggtaaaggtcaagctattgcttctgctttgggtaacttttttaagttctgggcttacgcttctactatcgttggtgctgttattgctgatcaatacgtcggtaaattcaaggctattgtcattgcttcaggtatctacattgtcggtttgaccattttggttgctactgctactccagctgctattaacggtggttctgcttttggtggtttgattgcttccatggttattatcggtttaggtactggtggtattaaggctaacgttactccattttgtgccgaacaataccaaaaaggttccgcttttgttaagaccttgaagtctggtgaaagagttgttgttgatccagaattgaccgtcgaaagaatgtttatgtggtacgttccatccttcttgattccattgatgtgggttaacatcaagcagtacagagttatagttttggctgccgttgttttcttgtgctcatctaacttgtacattaagaccaagccacaaggttctccaatagttgaaactgctagaactgtttacgttgccatttctgaaagaggtttcgaatctgctaaaccctcttcattgtctcaaagaggtagattggaaaagtactccgttgcttcttctgctaactacactgatcaatctgttgatggtgttaagaagggtattagagcttgcaagttgttcttgttgttccccttctacttcatttgctgggttcaaatctggaacaacctgatttctcaagctggtcaaatggctttacatggtactccaaatgacttgttgcaaaatttggacccaattgccttgatcatcttcatcccattattggatttggttgtctacccaaccttgagacatttcaagattgatttcagacccgagttgaagattaccgttggttttttcatggcctccatgtctatggtttacgcctctgttttacaacactacatctacatttctcccgctcaatctattcacgtttgggtacaaactccagcttacgttttagttgctttctctgaagctttcgttgttgttaccggtttggaaattgcttacactaatgctccagaatccttgaggtctttggtttcttctttgttctggttgactattggtgttgctgctgctatatgtattggtttggctccagtttctcaagacccatatttggtttggatgtatggttctttggctatcgtcggttttgttgctggtattttgttttacgtcttgtacggtagaacctccaaacaaccagttccagttttggattctgttgaaactacttctggtcaaagagaggacgaagaagctcaaattgaatctggtaagagaatggttgttactgccaaggactcttga

SEQ ID NO: 349 - protein, 574 aa, Neosartorya fumigata
MSDPVDAADLVAVAQAHAPKQSLEVVPVKEHETRVVATARRLDDQGREIPTEEEEHTLRRVAGKVHWTAYTIAFVELCERFSYYGTTAVCTCQLHSAASPRWFEHWSRVCLTLAIVNTFWCYLMPILGAYIADEFWGRLKTIQVSIAFAMVGHIILIISALPSVIAHPHGALGCFAVGLVIFGIGVGGFKSNIAPLIAEQHKETRSFIKVIPKTGERVIVDPAQTITRIFLYFYFMINVGALVGSIAMVYAEKYVGFWLAFLLPTIMFAFCPAVIFACRNKYEVTPATGSVSAKAFKLWAFALQGRWSWNPVRLVQNKPEWMTFDDQWVDEVRRAVKACAVFLWYPVYWLAYGQMTNNLTSQAATMQLNGVPNDLINNLDPLALIIFIPIMDQFIYPGIRRMGFNFTPLKRIYVGYFLASMSMIAAAVTQYYIYKMSPCGDHPSDCDKPAPINVWVQTLPYVLIAFSEIFTSITGYEYAFTKAPKNMKSLVQSIYLFMNAISSAIQQGLTALSTDPLLIWNYGFVAVLAFVAGNLFYLTHYSLDKEEDRLNNLEASAYLGTNPGARDEKIDPEP

SEQ ID NO: 350 - DNA, 1725 bp, Neosartorya fumigata
  source 1..1725: mol_type = other DNA
atgtccgatccagttgatgctgctgatttggttgctgttgctcaagctcatgctccaaaacaatctttggaagttgttccagtcaaagaacacgaaactagagttgttgctactgctagaagattggatgatcaaggtagagaaattccaaccgaagaagaagaacataccttgagaagagttgctggtaaagttcattggactgcttacactattgccttcgttgaattgtgcgaaaggttttcttattacggtactactgctgtctgtacctgtcaattgcattctgctgcttctccaagatggtttgaacattggtctagagtttgtttgaccttggctatcgttaacactttctggtgttacttgatgccaattttgggtgcttacattgctgatgaattttggggtagattgaaaaccatccaagtttccattgctttcgctatggttggtcatatcatcttgattatttccgccttgccatccgttattgctcatccacatggtgctttgggttgttttgctgttggtttggttattttcggtattggtgttggtggtttcaagtctaatattgctccattgattgccgaacagcacaaagaaactagatccttcattaaggttatcccaaagaccggtgaaagagttatagttgatccagctcaaaccattaccaggattttcttgtacttctacttcatgattaacgtcggtgcattggttggttctattgctatggtttacgccgaaaagtatgttggtttttggttggcttttctgttgccaactattatgtttgctttctgcccagctgttatcttcgcttgtagaaacaaatacgaagttactccagctaccggttctgtttctgctaaagcttttaagttgtgggctttcgctttacaaggtagatggtcttggaatccagttagattggttcaaaacaagccagaatggatgacctttgatgatcaatgggttgatgaagttagaagggctgttaaggcttgtgcagtttttttgtggtatccagtttactggttagcctatggtcaaatgactaacaacttgacttctcaagctgctactatgcagttgaatggtgttccaaacgatctgatcaacaacttggatccattggccttgattatcttcatcccaatcatggaccaattcatctacccaggtattagaagaatgggtttcaacttcactccactgaagagaatctacgttggttactttttggcctccatgtctatgattgctgctgctgttactcagtactacatctacaaaatgtctccatgtggtgaccatccatctgattgtgataagccagctccaatcaatgtttgggttcaaactttgccatacgttttgattgccttctccgaaattttcacctctattaccggttacgaatacgcttttacaaaggctccaaagaacatgaagtctttggtccaatctatctacctgtttatgaacgctatttcctccgctattcaacaaggtttgactgctttgtctactgacccattattgatttggaactacggtttcgttgctgttttggcttttgttgccggtaatttgttctacttgactcactactctctggacaaagaagaggatagattgaacaatttggaagcctctgcttacttgggtactaatccaggtgctagagatgagaaaattgatccagaaccataa

SEQ ID NO: 351 - protein, 618 aa, Fusarium oxysporum
MAPAGDSLAEPITVAGLRAEVLDEKRASISAEKRASIATDPRPATADAGAVTPAGGVTPDGQFPTAEELDTLRRVPNKIPMKLFSIAFIELCERFSYYGCTVVFTNFIQQKLPEGSTTGADPEQPGALGMGQRASTGITTFNQFWQYFMPLLGAYIADQYWGRYKTISWALGIDIIGHIILIMSAIPPVIGNQGGALGAMIIAIIVIGFGTGGFKPNVNPLIVEQLGEQYMHVKTLKSGERVIVDPAVTIERVYLWFYFCINVGALVGQVTMVFAEKEIGFWLSYTLPTFMLCLCPLVMWLNRHKYERRPPGGSVLGQALKTWFLAQKGCWSINPVATWKNLHKDDFWEKVKPSNFSHETRPKWMTFDDAWVDELSRGFNACAVFCWYPIFWLCYNQINNNLISQAAVMQRHGVPNDILSNLNPFALLIFIPLNDFFIYPALRKAGFRFTPIKKITAGFFTGAAAMIWAAVVQHYIYQKSECGKYASGEDCAAVEINVWAQTGSYVLIALSEVFASITSLEYAFSKAPKNMRSMVQAVALFMTAFSAALGQALVGLAADPLLVWNYGVVAILAVIAGTCFYVQFRDLDVHEDDLNALPEGHAGATADEEAPLGTKEAN

SEQ ID NO: 352 - DNA, 1857 bp, Fusarium oxysporum
  source 1..1857: mol_type = other DNA
atggctccagctggtgattctttggctgaacctattactgttgctggtttgagagctgaagttttggacgaaaaaagagcttccatttccgctgaaaagagagcatctattgctactgatccaagaccagctactgctgatgctggtgctgttactcctgccggtggtgttacaccagatggtcaatttccaactgctgaagaattggataccttgagaagagttccaaacaagatcccaatgaagttgttctccattgccttcattgaattgtgcgaaaggttttcttactacggttgtactgttgtgttcaccaacttcatccaacaaaaattgcctgaaggttctactactggtgctgatccagaacaaccaggtgctttaggtatgggtcaaagagcatcaactggtattactacttttaaccagttctggcaatacttcatgccattattgggtgcttacattgctgatcaatattggggtagatacaagaccatttcttgggctttgggtattgatatcatcggtcatatcatcttgatcatgtctgctattccaccagtcattggtaatcaaggtggtgctttgggtgctatgattattgccattatcgttatcggttttggtactggtggtttcaagccaaatgttaacccattgatcgttgaacaattgggtgaacagtatatgcacgttaagactttgaagtccggtgaaagagttatagttgatccagctgttaccatcgaaagggtttatttgtggttctacttctgcattaacgttggtgcattggttggtcaagttactatggttttcgccgaaaaagaaatcggtttctggttgtcttataccttgccaactttcatgttgtgtttgtgcccattggttatgtggttgaacagacataagtatgaacgtagaccaccaggtggttctgttttgggtcaagctttgaaaacttggtttttggctcaaaaaggttgctggtctattaacccagttgctacttggaaaaacttgcacaaggatgatttctgggaaaaagtcaagccatctaacttctctcacgaaactagaccaaagtggatgacttttgatgatgcttgggttgacgaattgtctagaggttttaatgcttgcgctgttttctgctggtatcctattttttggttgtgctacaatcagatcaacaacaacttgatttcccaagctgctgttatgcaaagacatggtgttccaaacgatatcctgtctaatttgaatccattcgccttgctgattttcatcccattgaatgatttcttcatctacccagctttgagaaaggctggttttagattcactccaatcaagaagattaccgctggtttttttacaggtgctgctgcaatgatttgggctgctgttgttcaacattacatctaccaaaagtctgagtgtggtaaatacgcttctggtgaagattgtgctgcagttgaaatcaatgtatgggctcaaactggttcctacgttttgattgctttgtccgaagttttcgcctctattacctctttggaatacgctttttctaaggccccaaagaacatgagatctatggttcaagctgttgctttgttcatgactgctttttctgcagctttaggtcaagccttggttggtttggctgctgatcctttgttagtttggaattatggtgttgttgccatcttggctgttattgcaggtacttgtttttacgtccaattcagagatttggatgtccacgaagatgatttgaatgctttacctgaaggtcatgccggtgctacagctgatgaagaagctccattgggtacaaaagaagctaactga

SEQ ID NO: 353 - protein, 587 aa, Mucor circinelloides f. circinelloides
MSIKEKQDVIVQEHEGGFEVSETGEILIEPTEEDYKHLREVADHIPKAAYLVILIEFCERFTFYGLTGPFQNYIQNPDPGSYPAELPGAMGRGQQTATALNTFFQFWCYVTPIIGAIVADQYWGKYKTILVFSGLYFLGLLILTLTAMPAAIASGATFPGFIVAIIVIGLAAGGIKANVSPLVAEQYKNTKPFIKTIKPKSSSKYTADEGDMPANGQTVAPSSGSETRVIVSPQATYQKLFNYFYWGINVGSLIAITTIVIEQQVGFWAAFLLPTLVFIPCIAIVLLGKKFYVRNPPRGSIFVEVFKIIKLSFKNGLEGCKPTNLAVSHPELAAKATWDDVFIDELKRTFRACLVFCWYPIYWLCYSQMTSNMVSMAATMQTGNVPNDIMQNINPLTLVLFIPIMDKFVYPGLRRIGIPFRPIMRITCGFVFAALAMAYAAGIQALIYSSGPYYDNPSGTNKNDVSAGYIVPAYILIGISEIFASITGLEYAYKKAPEKMKSLVMALFLFMNCLGSVLGFALVSVAYNPKLKWMYAGISIAMGICAPLFYYCHGKNDATDVADDAIGRHDQKENQEVEYDYEEKSSA

SEQ ID NO: 354 - DNA, 1764 bp, Mucor circinelloides f. circinelloides
  source 1..1764: mol_type = other DNA
atgtccatcaaagaaaagcaggacgtcatcgttcaagaacatgaaggtggttttgaagtttctgaaaccggtgaaattttgatcgaacctaccgaagaagattacaagcacttgagagaagttgccgatcatattccaaaagctgcctacttggttatcttgatcgaattctgtgaaaggttcaccttctatggtttgactggtccattccaaaactacattcaaaatccagatccaggttcttacccagctgaattgccaggtgctatgggtagaggtcaacaaactgctactgctttgaatacctttttccaattctggtgttacgtcaccccaattattggtgctatagttgctgatcaatactggggtaagtacaagaccattttggttttttctggcttgtacttcttgggcttgttgattttgactttgactgctatgccagctgctattgcttctggtgctacttttccaggttttatcgttgccattatcgttattggtttggctgctggtggtattaaggctaatgtttctccattggttgctgagcagtacaaaaacacaaagccattcattaagacgatcaagccaaagtcctcttcaaagtatactgctgatgaaggtgatatgccagcaaatggtcaaactgttgctccatcttctggttctgaaactagagttatagtttctccacaagccacctaccaaaagttgtttaattacttttactggggcatcaacgtcggttccttgattgctattactaccatcgttatcgaacaacaagttggtttttgggctgcttttttgttgccaaccttggttttcattccatgcattgctatcgttctgttgggcaagaaattctacgttagaaatccaccaagaggctccattttcgttgaagttttcaagatcatcaagctgtccttcaagaatggtttggaaggttgtaagccaactaacttggctgtttctcatccagaattagctgctaaagctacttgggatgatgttttcattgacgagttgaagagaaccttcagagcttgtttggttttctgttggtatccaatctactggttgtgctactctcaaatgacttccaacatggtttctatggctgctactatgcaaactggtaatgttccaaacgacatcatgcagaacattaacccattgactttggtcttgttcatcccaatcatggataagtttgtttacccaggtttgagaagaatcggtattccattcagaccaatcatgagaattacctgcggttttgtttttgctgctttggctatggcttatgctgctggtattcaagctttgatatattcctctggtccttactacgataacccatctggtacaaacaagaacgatgtttctgctggttatatcgttccagcctacattttgattggtatctccgaaattttcgcctccattacaggtttggaatacgcttataagaaagccccagaaaagatgaagtcattggttatggccctgttcttattcatgaactgtttgggttctgttttgggtttcgctttagtttctgttgcctacaatccaaagttgaagtggatgtacgctggtatttctattgccatgggtatttgtgctcccttgttttattactgccatggtaagaatgatgctaccgatgttgctgatgatgctattggtagacacgaccagaaagaaaatcaagaggttgaatacgactacgaagaaaagtcatctgcctga

SEQ ID NO: 355 - protein, 535 aa, Aspergillus calidoustus
MSRDCKKRDIPVTQTEAEAPTRGDLVSVDNTGLRRIPDRIPWVVLLVIIVELGERFTYFGLSGPLQNYIKNPYGGEQPGALGRGQAVATALGNFFKFWAYASTVLGAIVADQFLGKFKAILIACGIYVVGLTILVTTATPSAINGGSAFGGLVAAMVIIGAGTGGIKANVTPFCAEQYQKAHAYVKTLKSGEQVIVDPELTVERMFLWFYWAVNIGALSPLITVNVETHVSFWLAYLIPLIVIVIIAALFLCSNKLFLKTRPRGSPIVDAARTVHIAIAERSFEKAKPSALRENGKFDHYPFANKSGYTDYSVEKVKTGITACKLFLLFPLYFVCWTQIWNNLISQAGQMALHGTPNDLLQNLNPIALIIFIPLLDFVVYPLLRRYKINFRPELKVTAGFFMAAVSMVYACVLQHYIYKSPPNSIHVWIQAPIYLLVGFSEAFVVITGLEIAYTKAPESLRSLVSALFWLTIGIAAAICIALAPVSQDPYLVWMYGSLAIVGCLGGILFYVLFGRAFDAPVPLDLVGCDAEPNKV

SEQ ID NO: 356 - DNA, 1608 bp, Aspergillus calidoustus
  source 1..1608: mol_type = other DNA
atgtccagagactgcaagaagagagatatcccagttactcaaactgaagctgaagctccaactagaggtgatttggtttctgttgataacaccggtttgagaagaatcccagatagaattccatgggttgttttgttggttatcatcgtcgaattgggtgaaagattcacttactttggtttgtctggtccattgcagaactacattaagaatccatatggtggtgaacaaccaggtgctttaggtagaggtcaagctgttgctactgctttgggtaatttctttaagttttgggcttacgcctctacagttttgggtgctatagttgctgatcaattcttgggtaaattcaaggccattttgattgcttgcggtatctatgttgttggcttgactattttggttactactgctactccatccgctattaacggtggttctgcttttggtggtttggttgctgctatggttattattggtgctggtactggtggtattaaggctaatgttactccattctgtgccgaacaataccaaaaagctcatgcttacgttaagaccttgaagtcaggtgaacaagttatcgttgatccagaattgaccgtcgaaagaatgtttttgtggttttactgggccgttaacattggtgctttgtctccattgattaccgttaacgttgaaacccatgtttctttctggttggcttacttgattccattgatcgtcatcgttattatcgctgctttgttcttgtgctccaacaagttgttcttgaaaactagaccaagaggttccccaatagttgatgctgctagaactgttcatattgccattgctgaaaggtctttcgaaaaagctaaaccatctgccttgagagaaaacggtaaattcgatcattacccattcgctaacaagtctggttacactgattactccgttgaaaaggttaagactggtattaccgcttgcaagttgtttttgttgttccccttgtacttcgtttgctggactcaaatttggaacaacctgatttctcaagctggtcaaatggctttacatggtactccaaatgacctgttgcaaaacttgaatccaattgccttgatcatcttcatccctttgttggatttcgttgtttacccactgttgagaaggtacaagattaacttcagacctgaattgaaagttaccgccggttttttcatggctgctgtttctatggtttatgcttgtgtcttgcaacactacatctacaagtctccaccaaactctattcatgtttggatacaagctcccatctacttgttggttggtttttctgaagccttcgttgttattaccggtttggaaattgcttacactaaggctccagaatccttgagatctttagtttcagctttgttttggctgaccattggtattgctgctgctatatgtattgctttggctccagtttctcaagatccatatttggtttggatgtacggttctttggctatcgttggttgtttaggtggtatcttgttctacgttttgttcggtagagcttttgatgctccagttccattggatttggtcggttgtgatgctgaacctaacaaggtttaa

SEQ ID NO: 357 - protein, 607 aa, Microbotryum lychnidis-dioicae
MVGMQGTDAAVAGLAFATYDEALQQEQFANSEKAPASYGSPKRSDSFEASTAAIASDAPTEEDKVNLRRVPAPIPIASFLIGFIELAERFSYYGSTVVFTNFIQQKLPAGSTTGSSTANQVSGALGKGQRAATGLTTFNSFWVYVTPLFGAYIADTYLGRYKTICWAVVVALIGHVILTVSAIPSVIAKPDTSLGIFVVAIIIMGIGTGAFKSNISPLIAEQSAVGPLRVETRKNGERVLVDPILTASRVYMYFYLSVNVGALVGQIGMVYAEKRVGFWLSYLLPTLVFLFCPVILWIGRNRYIKTPPNGSVLSKSVRVIRFAGRGKWTQPKRLTANDFWDAAKPSNIPVEQRPGWMTFDDAYIDELRRGLKACKVFVWYPIWWLTYNQCNNNLVSQAATMQTHGLPNDILSNLDPFALLILIPVCDLLVYPALRRYGIRFTPIKRITAGFLIGALAMLCAAIVQWQIYKQSPCGYQAATCEEFAPINVWAQTPSYVFIALSEIFASITGLEIAYTKAPKSMRSLVTAVFLFTSAISSALGEAFLALSSDPLLIWNYGVMGALSFVAGIGFFFSFRELDADEERLNDLPEGHVSQKYTEKELQAERS

SEQ ID NO: 358 - DNA, 1824 bp, Microbotryum lychnidis-dioicae
  source 1..1824: mol_type = other DNA
atggtcggtatgcaaggtactgatgctgctgttgctggtttggcttttgctacttatgatgaagccttgcaacaagaacaattcgccaattctgaaaaagctccagcttcttatggttccccaaaaagatctgattctttcgaagcttctactgctgctattgcttctgatgctccaactgaagaagataaggttaacttgagaagagtcccagctccaattccaattgcttcttttttgatcggtttcatcgaattggccgaaaggttttcttattacggttctactgttgtgttcaccaacttcatccaacaaaaattgccagctggttctactactggttcttctacagctaatcaagtttctggtgctttaggtaaaggtcaaagagctgctactggtttgactacttttaactctttctgggtttacgtcactcctttgtttggtgcttatattgctgatacttacctgggtagatacaagactatttgttgggctgttgttgttgccttgattggtcatgttattttgaccgtttctgccattccatccgttattgctaaaccagatacttccttgggtattttcgttgttgccattatcattatgggtattggtacaggtgctttcaagtccaatatttccccattgattgctgaacaatctgctgttggtccattgagagttgaaactagaaagaacggtgaaagagttttggttgatccaattttgactgcctccagagtttacatgtacttctacttgtctgttaacgttggtgctttggttggtcaaattggtatggtttacgctgaaaagagagttggtttttggctgtcttatttgttgccaaccttggtttttttgttctgcccagttattttgtggatcggtagaaacagatatatcaagactccaccaaacggttccgttttgtctaaatccgttagagttattagattcgccggtagaggtaaatggactcaacctaaaagattgaccgctaacgatttttgggatgctgctaagccatctaacattccagttgaacaaagaccaggttggatgacttttgatgatgcctacattgacgaattgagaaggggtttgaaagcttgcaaagttttcgtttggtatccaatttggtggttgacctacaatcagtgtaacaacaacttggtttctcaagctgctaccatgcaaactcatggtttaccaaatgacatcctgtctaacttggatccattcgccttgttgattttgattccagtttgcgatttgttggtttacccagctttgagaagatacggtattaggtttactccaatcaagagaattaccgccggttttttgattggtgcattggctatgttgtgtgctgctatagttcaatggcaaatctacaagcaatctccatgtggttatcaagctgcaacttgtgaagaattcgctcctattaacgtttgggctcaaactccatcttacgttttcattgccttgtccgaaattttcgcttctatcaccggtttggaaattgcttataccaaagctccaaagtccatgagatctttggttactgctgttttcttgtttacctccgctatttcttctgctttgggtgaagcttttttggccttgtcatctgatccattattgatctggaattacggtgttatgggtgccttgtcttttgttgcaggtattggattctttttctccttccgtgaattggatgctgacgaagaaagattgaatgatttgcctgaaggtcacgtgtctcaaaagtacactgaaaaagaactgcaagccgagagatcttga

SEQ ID NO: 359 - protein, 595 aa, Trichoderma gamsii
MANNHEDTAAELHEEFNERAHHGNEVHDLAGGFIAADEKKDFTTLSADGAEAGPTPDGEEPSDYERRTLRRIGENLPASAFLIAIVELTERFTYYGASGLFQNYISNGSHITTDSPGLGMGGQAATGLNLFFQWFCYVTPILGAIISDQYLGKYKTIMLFCCVYWVGLVILWTTSLPVSIAHGAGLPGYIVSIIIIGAGTGGIKSNIAPLIADQYQRRTMAIRTEKDGERIIIDPAITYQRIYMIFYWCINLGSLSLIATPFMEKYCGFWTAFLMCFIMFNFSIAILVIRRKSYIIHPPQGSIITDAFKAIGLMIMARNMDAAKPSWREANGKTKPVNWNDHFVDELKRAVRACKVFVFYPVFWVGYGQFSTNFVTQAGQMSGHGMPNDFMQNFDPISILIFTPILDLFVYPTLRKAGINIRPIARITLGFIFTSLCLGYAAIVQHLIYSSGPCYKDPLNCPAGTVDGQTVPNNIHIAVQAPAYVFVGLAEIFISVTGLEYAYTKAPPTMKSFVQSLYLFTNAFGSAISEALVSVSKDPEFVWMYTGVSVASFIVAIVFFFLFNHYDKIEDESFELDREQPTVPPTKEVEYEEAN

SEQ ID NO: 360 - DNA, 1788 bp, Trichoderma gamsii
  source 1..1788: mol_type = other DNA
atggccaacaaccatgaagatactgctgctgaattgcacgaagaattcaatgaacgtgctcatcatggtaacgaagttcatgatttggctggtggttttattgctgctgacgaaaagaaggatttcactactttgtctgctgatggtgctgaagctggtccaactccagatggtgaagaaccatctgattacgaaagaagaaccttgagaagaatcggtgaaaatttgccagcttccgcttttttgattgccatcgttgaattgactgaaaggtttacttattacggtgcctctggtttgttccagaactacatttctaacggttctcatattactaccgactctccaggtttaggtatgggtggtcaagctgctactggtttgaatttgtttttccaatggttctgctacgtcaccccaattttgggtgctattatttccgatcaatacctgggcaagtacaagaccattatgttgttctgttgtgtttactgggttggcttggttattttgtggactacttctttgccagtttccattgctcatggtgcaggtttgccaggttatatcgtttccattattatcattggtgctggtactggtggtatcaagtctaatattgctccattgattgctgaccaataccagagaagaactatggctattagaaccgaaaaggacggtgaaagaattatcatcgatccagctattacctaccagaggatctacatgattttctactggtgcattaacctgggctcattgtctttgattgctactccttttatggaaaagtactgtggtttttggaccgctttcttgatgtgcttcattatgttcaacttctcgatcgccatcttggtcattagaagaaagtcctacattatccatccaccacaaggttctattatcactgatgcttttaaggccatcggcttgatgattatggctagaaatatggatgctgccaaaccatcttggagagaagctaatggtaaaactaagccagttaattggaacgatcacttcgttgacgaattgaagagagctgttagagcttgtaaggtgtttgttttctacccagttttttgggttggttacggtcaattttctaccaactttgttactcaagccggtcaaatgtctggtcatggtatgccaaatgatttcatgcaaaacttcgaccccatctccattttgattttcactccaatcttggacttgttcgtttacccaactttgagaaaggccggtattaacattagaccaattgccagaattaccctgggttttatcttcacctctttgtgtttgggttatgccgctatagttcaacacttgatctattcttcaggtccatgttacaaggatccattgaattgtccagctggtacagttgatggtcaaactgttccaaacaacattcatattgctgttcaagctccagcctacgtttttgttggtttggctgaaattttcatctccgttacaggtttggaatacgcttatacaaaagctccaccaacgatgaagtctttcgttcaatccttgtatttgttcaccaatgcttttggttccgctatttctgaagctttggtttccgtttctaaggatccagaattcgtttggatgtacactggtgtttctgttgcttcttttattgtcgccatcgtgttctttttcttgttcaaccattacgacaagatcgaggacgaatctttcgaattggatagagaacaacctactgttccacctacaaaagaagtcgaatacgaagaagctaactaa

SEQ ID NO: 361 - protein, 568 aa, Aspergillus arachidicola
MHSVTLVMPESTRTPDVPDRQIQSMVTHSDIPKPLQADQAYEPGLRRVPDRIPWVVGLIIVVELGERFTYFGLSGPLQNYIKNPYVPGADLPGALGKGQAIASALGNFFKFWAYASTILGAVVADQYVGKFKAIIIASGIYIVGLTILVATATPAAINGGSAFGGLVASMVIIGLGTGGIKANVTPFCAEQYQRGSAFVKTLKSGERVVVDPELTVERMFMWFYWAVNIGALSPLITVNVEAKVSFWLAFLIPLIVIVLAAVVFLCSSNLYIKTKPQGSPIVETARTVYVAMSERGFENAKPSSLSQRGRLEKYSVASSANYTDQSVDGVKKGIRACKLFLLFPFYFICWVQIWNNLISQAGQMALHGTPNDLLQNLDPIALIIFIPLLDLVVYPTLRHFKIDFRPELKITVGFFMASMSMVYASVLQHYIYISPAQSIHVWVQTPAYVLVAFSEAFVVVTGLEIAYTNAPESLRSLVSSLFWLTIGVAAAICIGLAPVSQDPYLVWMYGSLAIVGFVAGILFYVLFGRTSKQPVPVLDSVETTPGQREDEEGRIESGKRMVVTTKDT

SEQ ID NO: 362 - DNA, 1707 bp, Aspergillus arachidicola
  source 1..1707: mol_type = other DNA
atgcactccgttactttggtcatgccagaatctactagaactccagatgttccagatagacaaatccaatctatggttacccattccgatattccaaaaccattgcaagctgatcaagcttatgaaccaggtttgagaagagttcctgatagaattccatgggttgttggtttgatcatcgttgttgaattgggtgaaagattcacctactttggtttgtctggtccattgcaaaactacatcaagaatccatacgttccaggtgctgatttgccaggtgctttaggtaaaggtcaagctattgcttctgctttgggtaacttttttaagttctgggcttacgcctctactattttgggtgctgttgttgctgatcaatacgtcggtaaattcaaggctattatcattgcctctggtatctacattgtcggtttgacaattttggttgctactgctactccagctgctattaacggtggttctgcttttggtggtttagttgcttccatggttattatcggtttaggtactggtggtattaaggctaatgttactccattctgtgccgaacaatatcaaagaggttcagctttcgttaagaccttgaaatctggtgaaagagttgttgttgatccagaattgaccgtcgaaagaatgtttatgtggttttactgggccgttaacattggtgctttgtctccattgattaccgttaacgttgaagccaaggtttctttttggttggctttcttgattcccttgatcgttatagttttggctgccgttgttttcttgtgctcatctaacttgtacattaagaccaagccacaaggttctccaatagttgaaactgctagaactgtttacgttgccatgtctgaaagaggttttgaaaacgctaaaccctcctcattgtcacaaagaggtagattggaaaagtactccgttgcttcttctgctaactacactgatcaatctgttgatggtgttaagaagggtattagagcttgcaagttgttcttgttgttccccttctacttcatttgctgggttcaaatttggaacaacctgatttctcaagctggtcaaatggctttacatggtactccaaatgacttgttgcaaaatttggacccaattgccttgatcatcttcatccctttgttggatttggttgtttacccaaccttgagacacttcaagattgatttcagaccagagttgaagatcaccgttggttttttcatggcttccatgtctatggtttatgcctccgttttacaacactacatctacatttctccagctcaatccattcacgtttgggtacaaactccagcttatgttttagttgccttctccgaagcttttgttgttgttactggtttggaaattgcttacactaacgctccagaatccttgagatctttggtttcttctttgttctggttgaccattggtgttgctgctgctatatgtattggtttggctccagtttctcaagacccatatttggtttggatgtatggttctttggctatcgttggtttcgttgctggtattttgttctacgttttgttcggtagaacctccaaacaaccagttccagttttggattctgttgaaactactccaggtcaaagggaagatgaagaaggtagaattgaatccggtaagagaatggttgttactaccaaggatacctaa

SEQ ID NO: 363 - protein, 576 aa, Choanephora cucurbitarum
MSKKEEQISKEAFEVHTQEEFEVQSQYKDTSNLRRVAEGIPVAAWFILVNEFCERFAYYGGSTPFQNYVQNGPYDKTPGQLGRGQSTATALQNFFTFFCYFTPVLGAIVADQYIGRYWTIIIFSIVYMIGWLILTTTSLPAAFESGAGFPGYIVSLIVIGFGTGGIKGIVSPLCADQYRRTENYVKELPSGELVMVDYDLSIQHLYNWFYWAINVGSLLGGIICPLLEEHVGFWAAFLLPTCMFAVAILVFIAGTKLYYKPKATSSVILKAWEVITFANKQAKLPDNKQARKECKDVLDFAKRNSEIPAVKQWTPEAEQAASKWSDSFVDELKQAVMACKIFVPLSIYWVCYSQLSNNLISQAGVMSRPPSLPNDIMNNFDPIALIIFIPITDMFFYPMLRRLNINFGSQLRITVGFFLGCLSMVYAAIVQHYIYQDPLFISSGGEESSISVFIQIPCYFLIAFSEIFASITSIEYAYTHAPASMKSLVSALSLWPNCVSALISLAISPASHDPNMVWVYTGVACGSFVCGCLYYYLFAHYDTLDEEFKLKKMMANQNYLPEAAATAEAGEKVSVA

SEQ ID NO: 364 - DNA, 1731 bp, Choanephora cucurbitarum
  source 1..1731: mol_type = other DNA
atgtccaagaaagaggaacagatctccaaagaagctttcgaagttcatacccaagaagaattcgaagtccaatctcagtacaaggatacctctaacttgagaagagttgctgaaggtattccagttgctgcttggtttattttggttaacgaattctgcgaaaggttcgcttattatggtggttctactccattccaaaactacgttcaaaatggtccatacgataagaccccaggtcaattaggtagaggtcaatctactgctactgccttgcaaaatttctttaccttcttctgttacttcaccccagttttgggtgctatagttgctgatcagtatattggtagatactggaccatcatcatcttctccatcgtttacatgattggctggttgattttgactactacttctttgccagctgcttttgaatctggtgctggttttccaggttatatcgtttccttgatcgttatcggttttggtactggtggtattaagggtatagtttctccattgtgtgcagaccagtatagaagaactgagaactacgtaaaagaattgccatccggtgaattggttatggttgattacgatttgtccatccagcacttgtacaattggttttactgggctattaacgtcggttctttgttaggtggtatcatttgtcctttgttggaagaacatgttggtttttgggctgcttttttgttgccaacttgtatgtttgctgttgccatcttggttttcattgctggtactaagttgtactacaagccaaaggctacctcctctgttattttgaaagcttgggaagttattaccttcgctaacaagcaagctaagttgccagataacaaacaggctagaaaagaatgcaaggatgttttggatttcgccaagagaaactctgaaattccagctgttaagcaatggactccagaagctgaacaagctgcttctaaatggtctgattctttcgttgacgaattgaagcaagctgttatggcttgcaagattttcgttccattgtctatctactgggtctgctattctcaactgtccaacaacttgatttctcaagctggtgttatgtctagaccaccatctttgccaaacgatatcatgaacaacttcgatccaattgccttgatcatcttcattccaatcaccgatatgttcttctacccaatgttgagaaggctgaacatcaatttcggttcccaattgagaattaccgtcggttttttcttgggttgcttgtctatggtttatgctgctatcgttcaacactacatctaccaagatcctctgtttattagttccggtggtgaagaatcctccatctccgtttttattcaaatcccttgctacttcttgatcgccttctcagaaattttcgcctccattacctctattgaatacgcttatactcatgctccagcctctatgaagtctttggtttctgctttgtctttgtggccaaattgtgtttccgctttgatttccttggctatttctccagcttctcatgatccaaatatggtttgggtttacactggtgttgcttgcggttcttttgtttgtggttgcctgtattattacttgttcgctcattacgataccctggacgaagaattcaagctgaaaaagatgatggctaaccagaactatttgcctgaagctgctgctacagctgaagctggtgaaaaagtttctgttgcttga

SEQ ID NO: 365 - protein, 574 aa, Hesseltinella vesiculosa
MSKESKTDIDPTNVEVTTVINDESSVNVNDVTSLRRVTESIPVAAWFILINELCERLSYYGGSALFQNYVQFSMSDDPQGKLARGQSMATALQNFFTFFCYVTPMLGAIVADQYLGRYWTIIFFSIIYLVGWVVLTTTSLDSVPVSSAFPGYIVSLIILGLGTGGIKGIVSPMCADQYKHDRDYVKELPNGELVLVDYTLSIQSLYNWFYFAINVGSIIGGLACPYLQLYVGFWAAYLLPTCFFVAAILAFLAGSPFYVKPKPNGSIIVTAWKVFVFAWKQARVSGNEMARKKCRDFLEFAKRDTSDIGEAVVPWTAEQEEHAALWTDTFVDELKQAVMACRIFLPLSIYWLCYNNLNNNLISQAAQMNRPNGLPNNVLLVFDPILLVIFIPIVDLFFYPALRKMKINFFPQQRITVGFFLGSLSMVYAAVLQYYIYKDAAYIETGVASISVFLQVPAYCLIAFSEIFASITSIEYAYTHAPKSCKSLVSACSLFPNCVAALLGMALAPVSEDPKMVWTYSGIAIAAFVFGILYYLTFRHYDDLDEEFRLKQLLKNSEEIHIDRHVEMDVKEKF

SEQ ID NO: 366 - DNA, 1725 bp, Hesseltinella vesiculosa
  source 1..1725: mol_type = other DNA
atgtccaaagagtccaagaccgatatcgatccaactaacgttgaagttaccaccgttatcaacgatgaatcctccgttaatgttaacgatgtcacctctttgagaagagtcactgaatctattccagttgctgcctggttcattttgattaacgaattgtgcgaaaggctgtcttattatggtggttctgctttgttccaaaactacgtccaattctccatgtctgatgatccacaaggtaaattggctagaggtcaatctatggctactgccttgcaaaatttctttaccttcttctgttacgtcaccccaatgttgggtgctatagttgctgatcaatatttgggtagatactggacgatcatcttcttctccattatctatttggttggttgggttgttttgaccaccacttctttggattctgttccagtttcttctgcttttccaggttacatcgtttccttgatcatcttaggtttaggtactggtggtatcaagggtatagtttctccaatgtgtgctgatcagtacaagcacgatagagattacgtaaaagaattgccaaacggtgaattggttttggttgattacaccttgtccatccagtccttgtataattggttctacttcgccattaacgtcggttctatcattggtggtttggcttgtccatacttgcaattatatgttggtttttgggctgcctacttgttgccaacttgtttttttgttgctgctatcttggctttcttggctggttctccattttatgttaagccaaagccaaacggctctattatagttactgcttggaaggtttttgtgttcgcttggaaacaagctagagtttctggtaacgaaatggctagaaagaagtgcagagatttcttggaattcgctaagagagatacctccgatattggtgaagctgttgttccatggactgctgaacaagaggaacatgctgctttgtggactgatacttttgttgacgaattgaagcaagctgttatggcctgtagaattttcttgccattgtctatctactggctgtgctacaacaatctgaacaacaacttgatttcccaagctgcccaaatgaatagaccaaatggtttgccaaacaacgtcttgttagttttcgatccaatcctgttggttatcttcatcccaatcgttgacttgttcttttacccagctttgaggaagatgaagatcaacttttttccccaacaacgtatcaccgtcggttttttcttgggttctttgtctatggtttatgctgccgtcttgcagtactacatctacaaagatgctgcttacattgaaaccggtgttgcctctatttctgttttcttgcaagttccagcctactgcttgattgctttctctgaaattttcgcctccatcacctctattgaatacgcttatactcatgctccaaagtcctgtaagtctttggtttctgcatgttctttgttcccaaattgtgttgcagctttgttaggtatggctttagctcctgtttctgaagatccaaagatggtttggacttactccggtattgctattgctgcttttgttttcggtatcctgtactacttgaccttcagacattacgatgatttggacgaagaattcaggttgaagcagttgttgaagaactccgaagaaatccatatcgatagacacgttgaaatggacgtcaaagagaagttctga

SEQ ID NO: 367 - protein, 477 aa, Encephalitozoon cuniculi
MTIMNGTTLFLIICNEFCERFCFYGLKSLLFSFTRSEYGFTIKESTVNLHFFISMSYLFTLFGGLLSDMFLGRYSTIVLLSSLYLTGTSLLTYCSIVSGSPGLMVGSLLMIAVGTGGIKPCVAAFGGDQFGPDDAQDLRRFFDFFYFAINIGSMVSMVLTPTMSSVGCLGKQSCYPLAFGTSSTLLGASILLFIIGKRFYVIKPVRKEQFSRTFHSLVQNLKELFRRQSRDSERKTQGTLKTVSEAACISHEEDDKEKTLKILRILGPAAFFWMLSDQQSSSWVEQGTKMETHQSILGYGMDILPSQMQAFNAVFILLFIPLFSKMIYPLMGLAGVFSSPEEKMGFGIALASLSFFCSGYLEYRIGLPAPAGQRLSIMWQLPQYVLMTAGEIMLNVTGMEYMYTEAPEPMKSLVSSMWLLTVTAGNLLVMVLTFLDPVALFSSRAHDMWSFVAYGTAGLLASRCMFQASKAAKRNRK

SEQ ID NO: 368 - DNA, 1434 bp, Encephalitozoon cuniculi
  source 1..1434: mol_type = other DNA
atgaccattatgaacggcaccaccttgttcttgattatctgtaacgaattctgcgagaggttctgtttttacggtttgaagtctctgttgttcagcttcactagatctgaatacggtttcaccatcaaagaatccaccgttaacttgcatttcttcatctccatgtcttacctgttcactttgtttggtggtttgttgtccgatatgttcttgggtagatactccactatcgtcttgttgtcctcattatacttgaccggtacttctttgttgacctactgttctatagtttctggttctccaggtttgatggtcggttctttgttaatgattgctgttggtactggtggtattaagccatgtgttgctgcttttggtggtgatcaatttggtccagatgatgctcaagatttgagaagattcttcgacttcttctacttcgccattaacatcggttctatggtgtctatggttttgactccaactatgtcatctgttggttgtttgggtaagcaatcttgttaccctttggcttttggtacatcttcaactttgttgggtgcctccattttgttgttcattatcggtaagagattctacgtcatcaagccagtcagaaaagaacaattctctagaaccttccactccttggtccaaaatttgaaagagttgttcagaaggcagtccagagattctgaaagaaaaactcagggtactctgaaaaccgtttctgaagctgcttgtatctctcatgaagaagatgacaaagaaaagaccctgaagatcttgagaattttgggtccagctgcttttttctggatgttgtctgatcaacaatcctcctcatgggttgaacaaggtacaaaaatggaaacccaccaatccattttaggttacggtatggatatcttgccatctcaaatgcaagctttcaacgccgtttttatcttgttgtttatccccttgttctccaagatgatctatccattgatgggtttagctggcgttttttcatctcctgaagaaaagatgggtttcggtattgctttggcttccttgtcttttttttgctctggttacttggagtacagaattggtttgccagctccagctggtcaaagattgtctattatgtggcaattaccccagtacgttttgatgactgctggtgaaattatgttgaacgtaactggtatggagtatatgtacactgaagctccagaacctatgaagtctttggtttcttctatgtggttgttgactgttactgctggtaacttgttggttatggtcttgacttttttggatccagtcgctttgttttcttcaagagcacatgatatgtggtcctttgttgcttacggtacagctggtttgttagcttctagatgtatgttccaagcttctaaggctgctaagagaaacagaaagtga

SEQ ID NO: 369 - protein, 661 aa, Rosellinia necatrix
MSTAGGQPVDGVEAAKGNAPALDEKALPSDKEDIVTPKDDVGVLASGSDTDEVLRGPNGEEYPSKKDLETLRRVKGHISPIIYTIAFIELCERFAYYGTTAVFVNFIQQPLPEGSTTGAAGTFGQPGALGKGQQASTGLVTFNSFWAYLMPLLGGYLSDTYWGKYKTIHVAIVVATFGHLILIVSALPPVIKNPDAALGVFSLGLIFFGIGVGFFKANISPMIAEQYEASHPRAVVETLKSGERVIKDPVLTISVIYMRYYFFINVGSLVGQISMVYAEKYVGFYLSFTLPTALFFFCPAVLIFFKNKYVRRPPTGSVIGKFFGLLGLGMKGRWSANPIRLWKNIREPGFFERVKPSNIPEADRPAWMTFDDNWVDEVRRGIKACQVFFLFPIYWLPYNQLNSNLTSQAATMVLGGVPNDVINNLDPIALLIFIPICDKLLYPFLRRVGYNFTPIKKITAGFALGTLAMVVGAIIQHYIYWESPCRTSSGYGHVADCKSDLGFASGANVDERLYKPPLTVWIQTPAYVLIAFSEIFASITGLEYAFTKAPKNMRGFITGIFWFAQAFSAAIAQAFVPLSTDPLLVWLYTTVAIIAAIGGLVFHFVFMKLDKEEEALNALPDSVFRGSKNQNEDFEAIKEEQAQADQIRHAQGLDEKLGTNS

SEQ ID NO: 370 - DNA, 1986 bp, Rosellinia necatrix
  source 1..1986: mol_type = other DNA
atgtctactgctggtggtcaaccagttgatggtgttgaagctgctaaaggtaatgctccagctttggacgaaaaagctttgccatctgacaaagaagatatcgttactccaaaggatgatgttggtgttttggcttctggttctgatactgatgaagttttgagaggtccaaacggtgaagaatacccatctaaaaaggatctggaaaccttgagaagagttaagggtcatatttccccaatcatctacaccattgccttcattgaattgtgcgaaagatttgcctattacggtactactgctgttttcgtcaacttcattcaacaaccattacctgaaggttctactactggtgctgctggtacttttggtcaacctggtgctttaggtaaaggtcaacaagcttctactggtttggttacctttaattctttctgggcttacctgatgccattgctaggtggttatttgtctgatacttattggggtaagtacaagaccattcatgttgctatagttgttgctaccttcggtcatttgatcttgatagtttctgctttgccaccagttatcaagaatccagatgctgctttgggtgttttttctttgggtttgattttcttcggtatcggtgttggttttttcaaggctaacatttctccaatgatcgccgaacaatatgaagcttctcatccaagagctgttgtcgaaactttgaaatctggtgaaagagtcatcaaggatccagttttgaccatctctgttatctacatgaggtactactttttcatcaacgtcggttctttggtcggtcaaatttctatggtttacgctgaaaagtatgtcggcttctacttgtcttttactttgccaactgctctgttctttttctgtcctgccgttttgatcttcttcaagaacaaatatgttaggcgtccaccaaccggttctgttattggtaaattctttggtttgctaggcttgggtatgaaaggtagatggtctgctaatccaattaggttgtggaagaacattagagagccaggttttttcgaaagggttaagccatctaatattccagaagctgatagaccagcttggatgacttttgatgataattgggttgacgaagtcagaagaggtattaaggcttgtcaagtgtttttcttgttccccatatattggttgccctacaatcagttgaactccaacttgacttctcaagctgctactatggttttaggtggtgttccaaacgatgtcatcaacaatttggatcctattgccttgttgatcttcattccaatctgcgacaagttgttgtacccattcctaagaagagttggttacaacttcactcccatcaagaaaattacagctggtttcgctttgggtactttggctatggttgtcggtgctattattcaacattacatctactgggaatctccctgtagaacttcttctggttatggtcatgttgccgattgcaaatctgatttgggttttgcttcaggtgctaatgttgacgagagattatacaaaccaccattgactgtttggattcaaactccagcttacgttttgattgccttctctgaaattttcgcctctattaccggtttggaatacgcttttacaaaggctccaaagaacatgagaggtttcattactggtattttctggttcgctcaagctttctctgctgctattgcacaagcttttgttccattgtctactgatccattattggtctggttgtacactaccgttgcaattattgctgcaatcggtggtttagttttccacttcgtttttatgaagctggacaaagaggaagaagctttgaacgctttgccagattctgtttttaggggttccaagaatcagaacgaagatttcgaagccatcaaagaagaacaagctcaagccgatcaaattagacatgcacaaggtttagacgagaagttgggtactaattcctga

SEQ ID NO: 371 - protein, 470 aa, Ordospora colligata
MNTKTLVLIVSNELCERFCFYGLRSILFSFLRVQYSFSAKSSTAFLHLFISMSYLFTLLGGIVSDMVLGKYNTIVILGSVYLVGTLLLTYVSMEYASQGLILTSLLLISLGTGGIKPCVAAFGGDQLGQASTSDRKRFFDLFYFAINIGSMASMIMMPVLSDVGCLGKQSCYPLAFGASSTLLGASMLLFMSGKSSYIIKPPRKQQLADTFRILGTAIKTMINKKQEVAQENEIKAATASEKVHHLVSVSDQQKLVQISKVLLPAVFFWMLYDQQSSSWIEQGTKMSTHANIFGIQLEIVPSQMQAFNSIFTLALIPIFSKVVYPILDAIGIHLRPVVRMSTGIGFVSISFFISAFIQHRVDVLAYNHQQLSILWQLPQYILLTAGEVMLNITGLEYIYSEAPESMNSLSLSMWLLTVAAGNILVMLLSMIDVVALLSIPHHDTSTFIFYGTIGLLASIRMFLARRPANK

SEQ ID NO: 372 - DNA, 1413 bp, Ordospora colligata
  source 1..1413: mol_type = other DNA
atgaacaccaagaccttggtcctgatcgtttctaatgaattgtgtgaaaggttctgcttctacggtttgagatccattttgttctcattcttgagagtccagtactccttctctgctaaatcttctactgctttcttgcacctgttcatctctatgtcttacttgttcactttgctaggtggtatcgtttccgatatggttttaggtaagtacaacaccatcgtcatcttgggttctgtttatttggttggcactttgttgttgacctacgtgtctatggaatatgcttcccaaggtttgattctgacctccttgttgttaatctctttaggtactggtggtatcaagccatgtgttgctgcttttggtggtgatcaattgggtcaagcttctacttctgatagaaagagattcttcgacttgttctacttcgccattaacattggttctatggcctccatgattatgatgccagttttgtctgatgttggttgcttgggtaaacaatcttgttaccctttggctttcggtgcttcttctactttgttgggtgcttctatgttgttgtttatgtccggtaagtcctcctacattattaagccaccaagaaaacaacaattggccgatacctttagaattttgggtactgctattaagaccatgatcaacaagaaacaagaggttgctcaagagaacgaaatcaaagctgctactgcttctgaaaaggttcatcacttagtttccgtttccgaccaacaaaagttggtccaaatttccaaagttttgttgccagctgttttcttctggatgttgtacgatcaacaatcctcctcatggattgaacaaggtactaagatgtctacccatgccaacattttcggtattcaattggaaatcgtcccatctcaaatgcaagccttcaactctatttttaccttggccttgattcccatcttctccaaagttgtttatccaatcttggatgccatcggtatacacttaagaccagttgttagaatgtctaccggtatcggtttcgtgtctatttcctttttcatttccgccttcatccaacacagagttgatgttttggcttacaaccaccaacagttgtctattttgtggcaattaccacagtacattttgttgactgctggtgaagttatgttgaacattactggtttggagtacatctactctgaagctccagaatctatgaactccttgtctttgtctatgtggttattgacagttgctgccggtaacattttggtcatgttgttgagtatgatcgatgttgttgccttgttgtccattccacatcatgatacttctaccttcattttctacggcaccattggtttgttggcctctattagaatgtttttggctagaaggccagccaacaagtaa

SEQ ID NO: 373 - protein, 512 aa, Smittium culicis
MRVKEFKPETATSNEFTEEHSYTIPKDYQKGIPGNLKLASKLVIVTELCERFTFYGISVMLPSYLIDVFGLSSSETVFRAKAFSFLAYFFTIVGAIVADEWFGKFKTVMIFSIWYFVGTVILSVTSMDFLSVSGKNVGFIVAIYAFIAFGTGGIKANVSSFVAEQVDPVFKKTKNPGIYIDPKLAIERCYRYFYWAINTGAILGLAVCPQLAKRAGYASGYWSTAAVNFVGFGIFFLGRSKYKMVNPSESALKKVYRVISYARKNKKTDSDHWLDAAKGVNSPQWNDEFVEGLKGSIKAVKILCFLPIYWMLYMNVTDNFILQARRMKEPSWISSDQLILLVQLTLVILIPLYDYFFIPFLRFRNIKFGPIKRITIGFVLITLGFIYTIITQKRIYNSPPYFNFTAPGSNLDQKNNISLWWQIPSFIFLGSSEIFASVTSLEIAFSLSPPELKSLLNSLSLFTICLGNLLGMSLSKLSYDPIILNVYIGEACAMIVTTIIFFFCFRSFDKTY

SEQ ID NO: 374 - DNA, 1539 bp, Smittium culicis
  source 1..1539: mol_type = other DNA
atgagggtcaaagaattcaagccagaaactgctacttctaacgaattcaccgaagaacactcttacaccattccaaaggattaccaaaaaggtatcccaggcaatttgaagttggcttctaaattggttatcgtcaccgaattgtgtgaaaggtttaccttctacggtatctctgttatgttgccctcttacttgattgacgttttcggtttgtcatcctctgaaactgtttttagagctaaggccttttccttcttggcttacttttttactatcgttggtgctatcgttgccgatgaatggtttggtaaattcaagaccgttatgatcttctccatctggtactttgttggtactgttatcttgtccgttacctccatggatttcttgtctgtttctggtaagaacgttggtttcatcgttgctatctacgcttttattgcttttggtactggtggtattaaggccaacgtttcttcttttgttgccgaacaagttgaccccgttttcaaaaaaacaaagaacccaggtatctacatcgatccaaagttggctattgaaagatgctacagatacttctactgggctattaacaccggtgctattttgggtttagctgtttgtccacaattggctaaaagagctggttacgcttctggttattggtctactgctgctgttaattttgttggcttcggtatattcttcctgggcagatctaagtacaagatggttaatccatcagagtccgctttgaagaaggtttacagagttatttcctacgccagaaagaacaaaaagaccgattctgatcattggttggatgctgctaaaggtgttaattctccacaatggaatgatgaattcgtcgaaggtttgaagggttctattaaggctgttaagatcttgtgcttcttgccaatctattggatgttgtacatgaacgttaccgacaactttatcttgcaggctagaagaatgaaggaaccttcttggatttcctccgaccaattgatcttgttggttcaattgaccttggttatcttgatccccttgtacgattacttcttcatcccattcttgaggttccgtaacattaagtttggtccaatcaagagaatcaccatcggtttcgttttgattaccttgggtttcatctacaccatcatcacccaaaagagaatctataactctccaccatacttcaactttactgctccaggttctaacttggatcagaagaacaatatttccttgtggtggcaaatcccctcctttattttcttgggttcctcagaaattttcgcctctgttacctctttggaaattgccttttcattgtctccaccagagttgaagtctctgttgaactctttgtctttgttcaccatttgcttgggtaacttgttgggtatgtctctgtctaagttgtcttacgatccaatcatcttgaacgtctacattggtgaagcttgtgctatgatcgttaccaccatcatattctttttctgcttccgttctttcgacaagacctactaa

SEQ ID NO: 375 - protein, 550 aa, Colletotrichum graminicola
MASQNPPPADATQDEKSTAQEPLPQAVSLSEGEDGQSPNDEELATLRRVADRVSIAIYLVGAAEVAERFAFRCLTGPLQNYVEHPFTDGRHRGTDFRPGALGKGQAIATGIGFIFEFWCFLTPLFGAIIADSWLGRFKTICLGAIISTFGFIILFATSLPVALKAGAGLPGLLVALFVIGLGTGGIKSNVGPLIADQYSGKSRRIKTLKGGERVILDPDVTIQNIFSTYYWLINIGSSSMLLATWIEYEVGFWATFLMALGFYVAALGVLVAGRNTYVMVPPRGSDIPRAFKAVWVGMKHWDMDKAKPSYLAQHGNASVPWNDHFIEEIKVALVACRVFPIFWVCIGQTSGNTISLAARTNTYGLPNDFMGGFNPVTILILIPLLDYVIYPTLRKFGIAFRPVTRISFGFAALAGAVAFAAGTQHMVMRQPEYQVSVLWILPIFILSALSEIFALVSAVEFAYTKAPSTMKSFISALNLLTGSIGALLGFALSPTSTYTKVFYQFVVLAGIMGFLTPVFYLLFRKYNDDEERMNQLERRAREEPESPPTV

SEQ ID NO: 376 - DNA, 1653 bp, Colletotrichum graminicola
  source 1..1653: mol_type = other DNA
atggcctctcaaaatccaccaccagctgatgctactcaagacgaaaaatctactgctcaagaaccattgccacaagctgtttctttgtctgaaggtgaagatggtcaatctccaaacgatgaagaattggctactttgagaagagttgccgatagagtttctattgccatctatttggttggtgctgctgaagttgctgaaagatttgcttttagatgtttgaccggtccattgcaaaactacgttgaacatccttttaccgatggtagacatagaggtactgattttagaccaggtgctttaggtaaaggtcaagctattgctactggtatcggtttcattttcgaattctggtgtttcttgactcctttgttcggtgctattattgctgattcttggttgggtagattcaagaccatttgtttgggtgccattatttctaccttcggcttcattattttgttcgctacttctttgccagttgctttgaaagctggtgctggtttgccaggtttgttggttgctttgtttgttatcggtttaggtactggtggtatcaagtctaatgttggtccattgattgccgatcaatactctggtaaatccagaagaatcaagaccttgaaaggtggtgaaagagttatcttggatccagatgttaccatccagaacattttctctacttactactggctgatcaacatcggttcttcatctatgttattggccacctggattgaatacgaagttggtttttgggctactttcttgatggctttgggtttttatgttgctgcattgggtgttttggttgctggtagaaacacttatgttatggttccaccaagaggttccgatattccaagagcttttaaagctgtttgggttggtatgaagcactgggatatggataaggctaaaccatcttatttggcccaacatggtaatgcttcagttccttggaacgatcatttcatcgaagaaatcaaagttgccttggttgcctgtagagtttttccaattttttgggtctgtatcggtcaaacttctggtaacactatttctttggctgctagaactaacacttacggtttgccaaatgatttcatgggtggttttaacccagttaccatcttgattttgatccctttgttggactacgttatctaccctaccttgagaaagtttggtattgctttcagaccagtgaccagaatttcttttggttttgctgctttggctggtgccgttgcttttgctgcaggtactcaacatatggttatgagacaaccagaataccaagtttccgttttgtggatcttgcctatcttcattttgtctgccttgtccgaaattttcgctttggtttcagctgttgaattcgcttatacaaaggctccatctaccatgaagtctttcatttctgctttgaacttgttgaccggttctataggtgctttgttgggttttgctttgtctccaacttctacttacaccaaggttttctaccaattcgttgttttggcaggtatcatgggttttttgactccagttttctacttgctgttccgtaagtacaacgatgacgaagaaagaatgaatcagttggaaagaagggctagagaagaaccagaatctccaccaactgtttga

SEQ ID NO: 377 - protein, 597 aa, Exophiala dermatitidis
MADHHSEFTQLHAEVEQTRRASAVSAISEKVQEKPPLPATAEGTAPESIPEKGESNVETPVGGEPTDYEKTTLRHVGESLPRSVWLVAVIELCERFTYYGCQGIFQNYVQNPRDGSLGPGGLGMGHQGATGLTTFYSFWCYVTPLLGGFIADQYLGKYKTILSSASIYFVGLLILVLTSIPVSLNHGAGTGGYVTSILLTGIGTGGIKANVAPLIAEQYTRRHMEIAVTQKGERVVIDPYVTIQRIYMIFYWTINIGALSLLATPYMERDIGFWSAFTLCICMFAVGISVLVLGRKMYVDRPPEGSVVSDSFKAIGLMIKHRSMDAPKQSWLRAKGVNKTVTWEDGFVEELKRALTACKVFTLYPIYWVVYNQFSNNFVTQALQMRGHGIPNDLMQNFDPISIIVFVPILDRLVYPLLRKKRIAFKPISRIVTGFTIASLAMMYAAIVQHEIYIRGPCYEHPLCDASIVNGKAQGNDIHIAIQTPAYMLIGISEIFASATGYEYAYTKAPPRMKSFVQSLFLLTNAFGSAIGEAFVPAAYDPAIMWMYVGLCVGTFCVGILIWVLFHHLNAKEEQMNYIEDDVLPNDPKRRESHITA

SEQ ID NO: 378 - DNA, 1794 bp, Exophiala dermatitidis
  source 1..1794: mol_type = other DNA
atggccgatcatcattccgaattcactcaattgcatgccgaagttgaacaaactagaagggcttctgctgtttctgccatttctgaaaaagttcaagaaaagccaccattgccagctactgctgaaggtactgctccagaatctattccagaaaagggtgaatctaacgttgaaactccagttggtggtgaacctactgattacgaaaaaactaccttgagacacgtcggtgaatctttgccaagatctgtttggttggttgccgttattgaattgtgtgaaaggttcacttactacggttgccaaggtattttccaaaactacgttcaaaacccaagagatggttctttaggtccaggtggtttaggtatgggtcatcaaggtgctactggtttgactactttttactctttctggtgttacgtcactcctttgttaggtggttttattgccgatcaatatctgggcaagtacaagaccattttgtcatctgcttctatctacttcgtcggcttgttgattttggtcttgacttcaattccagtctccttgaatcatggtgctggtactggtggttatgttacctctattttgttgaccggtattggtacaggtggtattaaggctaatgttgctccattgattgctgaacagtacactagaaggcatatggaaattgctgttactcagaagggtgaaagagttgttattgatccatacgttaccatccagaggatctacatgattttctactggaccattaacatcggtgccttgtctttgttggctactccttatatggaaagagatatcggtttttggtctgctttcaccttgtgtatctgtatgtttgccgttggtatctccgttttggttttgggtagaaagatgtacgttgatagaccaccagaaggttctgttgtctctgattcttttaaggccattggcttgatgattaagcacagatctatggatgctccaaagcaatcttggttgagagctaaaggtgttaacaagactgttacttgggaagatggtttcgtcgaagaattgaaaagagctttgactgcttgtaaggtgttcacgttgtatccaatctattgggttgtttacaaccagttctccaacaactttgttactcaagccttgcaaatgagaggtcatggtattccaaatgacttgatgcaaaacttcgaccccatttccattatcgttttcgttccaatcttggacagattggtttaccctttgttgagaaagaagagaattgccttcaagcccatctctagaatcgttactggttttaccattgcttccttggctatgatgtatgctgctatagttcaacacgaaatctacattagaggtccatgttacgaacacccattgtgtgatgcttctattgtgaatggtaaggctcaaggtaacgatattcatatcgctattcaaaccccagcctacatgttgattggtatttccgaaattttcgcttctgctaccggttatgaatacgcttatacaaaagctccaccaaggatgaagtcctttgttcaatctttgttcttgttgaccaacgcttttggttctgctattggtgaagctttcgttcctgctgcttatgatccagctattatgtggatgtatgttggtttgtgtgttggtactttctgcgtcggtattttgatctgggttttgttccatcatttgaacgccaaagaagaacagatgaactacatcgaagatgacgttttgccaaacgatccaaaaagaagggaatctcatattaccgcctga

SEQ ID NO: 379 - protein, 623 aa, Candida albicans
MVSSDFENEKQPDVVQVLTDEKNISLDDKYDYEDPKNYSTNYVDDYNPKGLRRPTPQESKSLRRVIGNIRYSTFMLCICEFAERASYYSTTGILTNYIQRRIDPDSPHGWGAPPPGSPDASAGALGKGLQAASALTNLLTFLAYVFPLIGGYLGDSTIGRWKAIQWGVFFGFVAHLFFIFASIPQAIENANAGLGLCVIAIITLSAGSGLMKPNLLPLVLDQYPEERDMVKVLPTGESIILDREKSLSRITNVFYLAINIGAFLQIATSYCERRVGFWLAFFVPMILYIIVPIFLFIVKPKLKIKPPQGQVMTNVVKILAVLFSGNFIKRLWNGTFWDHARPSHMEARGTIYYNSKKKSAITWSDQWILDIKQTFDSCKIFLYYIIFNLADSGLGSVETSLIGAMKLDGVPNDLFNNFNPLTIIILIPILEYGLYPLLNKFKIDFKPIWRICFGFVVCSFSQIAGFVLQKQVYEQSPCGYYATNCDSPAPITAWKASSLFILAAAGECWAYTTAYELAYTRSPPALKSLVYALFLVMSAFSAALSLAITPALKDPNLHWVFLAIGLAGFLCAIVMLAQFWNLDKWMENETNERERLDREEEEEANRGIHDVDHPIEAIVSIKS

SEQ ID NO: 380 - DNA, 1872 bp, Candida albicans
  source 1..1872: mol_type = other DNA
atggtgtcctccgatttcgaaaacgaaaagcaaccagatgttgttcaagttttgaccgacgaaaagaacatctccttggatgataagtacgactacgaagatccaaagaactactctaccaactacgttgatgattacaacccaaaaggtttgagaaggccaactccacaagaatctaaatccttgagaagagtcatcggtaacatcagatactctaccttcatgttgtgcatttgtgaattcgctgaaagagcctcttattactctactactggtatcttgaccaactacatccagagaagaattgatccagattctccacatggttggggtgctccaccaccaggttctccagatgcttctgctggtgctttaggtaaaggtttacaagctgcttcagctctgactaacttgttgacttttttggcttacgtgttcccattgattggtggttatttgggtgattccactattggtagatggaaggctattcaatggggtgttttttttggtttcgttgcccatttgttcttcatcttcgcttctattccacaagctattgaaaatgctaatgccggtttgggtttgtgcgttattgctattattactttgtctgccggttccggtttgatgaagccaaatttgttgccattggtcttggatcaataccctgaagaaagagatatggttaaggttttgccaaccggtgaatccattatcttggatagagaaaagtccttgtccagaatcaccaacgttttttacttggccattaacatcggtgctttcttgcaaattgctacctcttactgtgaaagaagagttggtttttggttggctttcttcgttccaatgatcttgtatatcatcgtccccattttcttgttcatcgtcaagccaaagttgaagattaagccaccacaaggtcaagttatgaccaacgttgttaagattttggccgttttgttctccggtaacttcattaagagattgtggaatggtactttctgggatcatgctagaccatctcatatggaagctagaggtactatctactacaactccaaaaagaagtctgccattacctggtctgatcaatggattttggatatcaagcaaaccttcgactcctgcaaaatcttcttgtactacatcattttcaacttggccgattctggtttgggtagtgttgaaacttctttgataggtgccatgaagttggatggtgttccaaatgatttgttcaacaacttcaaccccttgaccatcatcattttgatcccaattttggagtatggcttgtacccattgctgaacaagttcaagattgacttcaagccaatttggaggatttgcttcggttttgttgtttgctccttctctcaaattgctggttttgtcttgcaaaagcaagtctacgaacaatctccatgtggttactacgctaccaattgtgattctccagctccaattactgcttggaaagcttcttctttgttcattttggctgctgctggtgaatgttgggcttatacaactgcttatgaattggcttacactagatctccaccagctttgaaatctttggtttacgctttgttcttggtcatgtctgctttttctgctgctttgtctttggctattactccagctttaaaggatccaaacttgcactgggtttttttggcaattggtttggctggttttttgtgcgctatagttatgttggctcaattctggaatttggacaagtggatggaaaacgagactaacgaaagagaaagattggacagggaagaagaagaggaagctaatagaggtatccatgatgttgatcatccaatcgaagctatcgtgtccattaagtcttga

SEQ ID NO: 381 - protein, 585 aa, Cajanus cajan
MENNEEHVTESDHKINYRGWKAMPFIIGNETFEKLGAIGTLANLLVYLTTVFNLKNITATNIINIFSGSTNFATLIGAFLSDTYFGRYKTLGFCTCTSFLGLIVIQLTAVFKNLHPPHCGKESKTCKGPTTGQMAFLVSGFGLLLVGAAGVRPCNLAFGADQFDPNTDSGKKGINSFFNWYFFTFTFAQMVSLTLIVYVQSNVSWAIGLGIPAALMLISCIVYFMGAKIYVKVKPSGSPITSIVQALVVAIKKRNLKLPAEPPMLFNYVPPKSANSKLPYTYQFRILDKAAIVTPQDKINQDGSAADPWNLSSIQQVEEVKCVVRVLPIWFSAILYHLVIVQMHTLLVFQALQSDRRFGHSNFKIPGASYNVFLMLSMTLWLPIYDRIVVPFLRRVTGKEGGITLLQRMGIGIFLSALSMLVAAVVEEHRRSLALTKPIGMQPRKGAISSMSGLWLIPQLALAGLSETFTAVGQVELYYKEFPENMRSIAGSLFYCGMAGSSYLSTFLISIVHRITAKSAMGNWLPEDLNKGRLDFFYYMIAALEIMNLGYFLMCSRWYKYKETSSSNLELNQMPKQSETSTISV

SEQ ID NO: 382 - DNA, 1758 bp, Cajanus cajan
  source 1..1758: mol_type = other DNA
atggaaaacaacgaagaacacgtcaccgaatctgatcataagattaactacagaggttggaaggccatgccattcattattggtaacgaaacctttgaaaagttgggtgccattggtactttggctaatttgttggtttacctgactaccgtgttcaacttgaagaacattactgccaccaacatcatcaacatcttctctggttctactaatttcgccactttgattggtgctttcttgtctgatacttacttcggtagatacaagaccttgggtttctgtacttgtacttctttcttgggtttgatcgtcattcaattgaccgctgttttcaagaacttgcatccaccacattgtggtaaagaatctaagacttgtaagggtccaactactggtcaaatggcttttttggtttctggtttcggtttgttgttggttggtgctgctggtgttagaccatgtaatttggcttttggtgctgatcaattcgatccaaatactgactctggtaagaagggtatcaactcttttttcaactggtacttcttcaccttcactttcgctcaaatggtttctttgaccttgatcgtttacgtccagtctaatgtttcttgggctattggtttgggtattccagctgctttgatgttgatttcctgtatcgtttacttcatgggtgctaagatctacgttaaggttaagccatctggttctccaattacctctatagttcaagctttggttgttgccatcaagaagagaaatttgaagttgccagctgaaccaccaatgttgtttaattacgttccaccaaagtccgccaattctaaattgccatatacctaccagttcaggattttggataaggctgctatagttaccccacaggataagatcaatcaagatggttctgctgctgatccatggaacttatcttctatccaacaagttgaagaggttaagtgcgttgttagagttttgccaatttggttctctgccatcttgtaccatttggttatcgttcaaatgcacaccctgttggttttccaagctttacaatctgacagaagattcggtcactccaactttaagattccaggtgcttcttacaacgtgttcctaatgttgtctatgactttgtggttgccaatctacgatagaatcgttgttccattcttgagaagagtcacaggtaaagaaggtggtattaccttgttgcaaagaatgggtattggcatctttttgtccgctttgtctatgttagttgctgccgttgtagaagaacacagaagatctttggctttgactaagccaattggtatgcaacctagaaagggtgctatttcttctatgtctggtttgtggttaattccacaattagctttggctggtttgtctgaaacttttactgctgttggtcaagtcgagttgtactacaaagaattcccagaaaacatgagatccattgccggttctttgttttattgtggtatggctggttcctcttacttgtctacctttttgatctccatcgttcatagaattaccgctaaatctgctatgggtaattggttgccagaagatttgaacaagggtagattggacttcttctactacatgattgctgccttggaaattatgaacttgggctactttttgatgtgctctaggtggtataagtacaaagagacatcctcctctaacctggaattgaatcaaatgccaaagcagtctgaaacctccaccatttctgtttga

SEQ ID NO: 383 - protein, 591 aa, Parasponia andersonii
MKTNMGETIDKNEKDDATVDSKINYRGWKIMPLVIGNEIFEKLGTFGTSSNLLVYLTTVFNMKRITAANTINIFNGTSNLVSLAGAFLSDTYFGRYNTLCFGTIASFMGLLLIDLTAAIKKLHPPHCGTEESHTCQGPTAGQMAFLLTSFGLLILGSGAIRPCNLAFGADQFNPKTESGKRGINSFFNWYFFTYTSAKMIAVTLIVYVQSNISWALGLSIPPALMFASTTLFFMGSKIYVKVKASGSPITSLAQVIVVAIKKRRLKLSDQPWISLYTYIPPKSINANLPYTDQFRFLNKAAIITPEDQIKPDGSPTEPWGLCCLQQVEEVKCVMRVLPIWLAATVYHVAIVQQQTYVVFQALQSDRRLGNVNFEIPAASYVVFTMLSLTIWIPLYDRIIVPFFQRLRRKEGGITLLERICIGIFLSILTSLVSGLAEDRRRTTALTKPTLGFNPRRGAISSMSASWLIPQLLLAGVAQAFADIGQVEFYYKQFPENMRSIAGSIFFCGLAGSNYLSSFLITIVHRTTEGSANGNWLPEDLNKGRLDYFYYMTAGLGAINLGFFLLCAKWYKYKGSGGITVEVGMDSKKPAV

SEQ ID NO: 384 - DNA, 1776 bp, Parasponia andersonii
  source 1..1776: mol_type = other DNA
atgaagaccaacatgggtgaaaccatcgacaaaaacgaaaaggatgatgctaccgttgactccaagattaactatagaggttggaagatcatgccattggttatcggtaacgaaatcttcgaaaagttgggtactttcggcacttcttctaacttgttggtttacttgactaccgtgttcaacatgaagagaattactgctgctaacaccatcaacatcttcaacggtacttccaacttggtttctttggctggtgcttttttgtctgatacttacttcggtagatacaacaccttgtgctttggtactattgcttctttcatgggcttgttgttgattgatttgaccgctgctattaagaagttgcatccaccacattgtggtactgaagaatctcatacttgtcaaggtccaactgctggtcaaatggctttcttgttgacttctttcggtttgttgatcttaggttccggtgctattagaccatgtaatttggcttttggtgccgatcaattcaacccaaaaactgaatctggtaagaggggtatcaactcttttttcaattggtacttcttcacctacacctccgctaaaatgattgctgttactttgatcgtctacgtccagtctaatatttcttgggctttgggtttgtctattccaccagctttgatgtttgcttctactaccttgtttttcatgggttccaagatctacgttaaggttaaggcttctggttctccaattacatctttggctcaagttatcgttgttgccatcaagaagagaaggttgaagttgtctgatcagccatggattagcttgtacacttacattccaccaaagtccattaacgctaacttgccatatactgaccagttcagattcttgaacaaggctgcaattattaccccagaagatcaaatcaaaccagatggttcaccaactgaaccatggggtttgtgttgtttacaacaagtcgaagaggttaagtgcgttatgagagttttgccaatttggttggctgctactgtttatcatgttgccattgtccaacaacaaacctacgttgttttccaagccttgcaatctgatagaagattgggtaacgttaacttcgaaattccagctgcttcttacgtcgttttcactatgttgtctttgaccatttggattcccttgtacgatagaatcatcgtcccattctttcagagattgagaagaaaagaaggtggcatcactttgttggaaagaatctgcattggcattttcttgtccatcttgacctcattggtttctggtttggctgaagatagaagaagaactactgctttgactaagccaaccttgggttttaatccaagaagaggtgctatctcttctatgtctgcttcttggttgattccacaattgctattagctggtgttgctcaagcttttgctgatattggtcaagtcgaattctactacaagcagttcccagaaaacatgagatctattgccggttctattttcttttgtggtttggccggttccaactacttgtcctcttttttgattaccatcgttcacagaactaccgaaggttctgctaatggtaattggttgccagaagatttgaacaaaggtcgtttggactacttttactacatgactgctggtttgggtgctatcaatttgggtttctttttgttgtgtgccaagtggtacaagtacaaaggttctggtggtatcactgttgaagtaggtatggattctaaaaagccagccgtttga

SEQ ID NO: 385 - protein, 591 aa, Rosa chinensis
MENSERETMVEVKKNEDQCSKAEEKVIYRGWKAMPFVIGNETFEKLGAIGTLSNLLVYLTTVFNMSSVRAATIINIFNGTTNFSTLIGAFVSDTYWGRFKTVACASIASFMGLVLIDFTAIFKDLHPPPCKTQDHNACKGPTGGQMAFLAAGLGLLIVGAAGIRPCNFAFGADQFNPKTEAGKKGVNSFFNWYFFTFTVAQMLSLTIIVYVQSNVSWSLGFGIPAILMLMSCALFFMGSKLYVKVKASGSPMTSVAQVIVVAFKKRKLKPLEQPWLSLFVYMPPNSMNAKLPYTHQFRCLDKAAIETPEDEKNPDGSAANPWRLCSMQQVEELKCLVRVLPIWAAALVYYVVIVQQHTYATFQALQFDRRVGKFEIPAASYYVFLMLAMTIWIPIYDRLVVPFLQIRTGIEGGITVLQRIGAGIFLSIVSMIVSAIVEERRRSIALTDPIPGIRTRGDISSMSGFWLVPQLALAGLAEAFTAIGQVEFYYKQFPENMRSIAGSLFFCGMAGSSYLSGFLIAIVHRTTEGAATGNWLPEDLNKGRLDYFYYMIAALGVVNFGYFLFIASWYQYKGTGIDTTTLEVEVAEKVV

SEQ ID NO: 386 - DNA, 1776 bp, Rosa chinensis
  source 1..1776: mol_type = other DNA
atggaaaactccgaaagggaaactatggtcgaagtcaaaaagaacgaagatcaatgctctaaggctgaagaaaaggttatctacagaggttggaaagctatgccattcgttattggtaacgaaacctttgaaaagttgggtgccattggtactttgtccaatttgttggtttacctgactaccgtgttcaacatgtcatctgttagagctgctaccatcatcaacattttcaatggtactaccaacttctccaccttgattggtgcttttgtttctgatacttactggggtagattcaagactgttgcttgtgcttctattgcttccttcatgggtttagttttgattgatttcaccgccatcttcaaggacttgcatccaccaccatgtaaaactcaagatcataatgcttgtaagggtccaactggtggtcaaatggcttttttggctgctggtttgggtttgttgatagttggtgctgctggtattagaccatgtaattttgcttttggtgccgaccaattcaacccaaaaactgaagctggtaagaagggtgttaactctttctttaactggtacttcttcaccttcaccgttgctcaaatgttgtctttgaccatcatcgtttacgtccagtctaatgtctcttggtctttaggttttggtattccagccatcttgatgttgatgtcttgtgctttgttcttcatgggctctaagttgtacgttaaggttaaggcttctggttctccaatgacttctgttgctcaagttatagttgttgccttcaagaagagaaagttgaagccattggaacaaccatggctatctttgtttgtttacatgccaccaaactccatgaatgctaaattgccatacactcaccaattcagatgtttggataaggctgctattgaaactccagaagatgagaaaaatccagatggttctgctgctaatccttggagattgtgttctatgcaacaagtcgaagaattgaagtgcttggttagagttttgccaatttgggctgctgctttagtttactacgttgttatcgttcaacaacatacctacgctacttttcaagccttgcaattcgatagaagagtcggtaagtttgaaattccagctgcctcttattacgtgtttttgatgttggctatgaccatttggatcccaatctatgacagattggttgtcccattcttgcaaattagaaccggtattgaaggtggtattaccgtcttgcaaagaattggtgctggtatctttctgtccatcgtttctatgatagtttccgccatagtggaagaaagaagaaggtcaattgctttgactgatccaattccaggtattagaaccagaggtgatatctcttctatgtctggtttttggttggttccacaattggctttggctggtttagctgaagcttttactgctattggtcaagtcgaattctactacaagcaattcccagaaaacatgagatccattgctggttctttgtttttctgtggtatggctggttcatcttacttgtccggttttttgattgccatcgttcatagaactactgaaggtgctgctactggtaattggttgccagaagatttgaacaagggtagattggactacttttactacatgattgctgccttgggtgttgttaatttcggttactttttgttcattgccagctggtatcagtacaaaggtactggtattgataccaccactttggaagttgaagttgccgaaaaggttgtctga

SEQ ID NO: 387 - protein, 599 aa, Pyrus betulifolia
MKAIMEKKERDSMEKNERGSTDEEPVIYRGWKVMPFVIGNETFEKLGAIGTLANLLVYLTSVFNMKRITAATLVTIFNGTTNFATLLGAFASDTYFGRYKTLGFSSIASFMGLLLIDFTAVFKNLHPPHCKPEEQGTCKGPTAGQMAFLLTGFGMLIVGAAGIRPCNLAFGADQFDQKTESGKRGVNSFFNWYMFTFTFAQMIALTLIVYIQSNVSWGLGFGIPAILMLISCVLFFMGSKMYVKVKARGSPMNSVAQVVVVSIAKRHLKLKEPERPWLSMFVYMPPDSINSKLPYTNQFRCLDKAAILTPDDKINPDGSAADPWKLCSMQQVEEVKCLLRVLPIWAAALIYHIAIVQQHTYVVFQALQSNRRLGKTGFQIPAASYSIFLMLGMTIWIPIYDRLLVPFLQRLTGKEGGITLLQRIGIGIFLSVITMLVSAFVEEHRRTIALTKPIPGIRTRGDISSMSGFWLVPQLTLAGLAEAFAAIGQIEFYYKQFPENMRSIAGSLFFCGMAGSSYLSSALIAIVHQTTEGAKTGNWLPEDLNKGRLDYYYYLIAALGVINLGYFLMCSKWYTYKGGGDNNALEVEVVQKSHDEHEI

SEQ ID NO: 388 - DNA, 1800 bp, Pyrus betulifolia
  source 1..1800: mol_type = other DNA
atgaaggccatcatggaaaagaaagaaagggactccatggaaaaaaacgaacgtggttctactgatgaagaaccagttatctatagaggttggaaggttatgccattcgtcattggtaacgaaacctttgaaaagttgggtgccattggtactttggctaatttgttggtttacctgacctccgttttcaacatgaagagaattactgctgctaccttggttaccattttcaatggtactactaatttcgccactttgttgggtgcttttgcttctgatacttacttcggtagatacaagactttgggcttctcttctattgcttctttcatgggtttgctgttgattgatttcaccgctgttttcaagaacttgcatccaccacattgcaaaccagaagaacaaggtacttgtaaaggtccaactgctggtcaaatggcttttttgttgactggttttggtatgttgatagttggtgctgctggtattagaccatgtaatttggcttttggtgccgatcaattcgatcaaaaaactgaatctggtaagaggggtgtcaactctttctttaattggtacatgttcaccttcaccttcgctcaaatgattgctttgactttgatcgtctacatccagtctaatgtctcttggggtttaggtttcggtattccagctattttgatgttgatctcctgcgtgttgttcttcatgggtagtaagatgtacgttaaggttaaggctagaggttctccaatgaattctgttgctcaagttgttgttgtttccattgctaagagacacctgaagttgaaagaaccagaaagaccatggttgtccatgtttgtttacatgccaccagattccatcaactctaaattgccatacactaaccagttcagatgcttggataaggctgctattttaaccccagatgataagattaacccagatggttctgctgctgatccttggaaattgtgttctatgcaacaagttgaagaggtcaagtgcttgttgagagttttgccaatttgggctgctgctttgatctatcatattgccatagttcaacaacacacctacgttgttttccaagccttgcaatctaatagaagattgggtaagaccggctttcaaattccagctgcttcttactctatcttcttgatgttgggtatgaccatttggatcccaatctatgatagactgttggtcccattcttgcaaagattgactggtaaagaaggtggtatcaccttgttacaaagaatcggtatcggcatcttcttgtccgttattactatgttggtttccgccttcgttgaagaacatagaagaactattgcactgaccaaacctattccaggtattagaactagaggtgacatctcttcaatgtctggtttttggttggttccacaattgactttggctggtttggctgaagcttttgctgctattggtcaaatcgaattctactacaagcagttcccagaaaacatgagatctattgccggttctttgtttttctgtggtatggcaggttcttcctatttgtcatctgctttaatcgccatcgttcatcaaactactgaaggtgctaaaactggtaattggttgccagaagatttgaacaagggtagattggattactactactatttgattgctgccttgggtgttatcaacttgggttactttttgatgtgctctaagtggtacacttacaaaggtggtggtgataacaatgccttggaagttgaagttgttcaaaagtcccatgacgaacacgaaatctga

SEQ ID NO: 389 - protein, 579 aa, Corchorus capsularis
MEKNEKKDDEPEINYRGWKAMPFIIGNETFEKLGAIGALSNLVVYLTTVFNLKNITAATMINVFDGTTNFGTLVGAFLCDTYFGRYKTLGFATIASFMGLLAIQLTAAIPELHPPQCAAQGECNGPTVGQMAFLLTGLGLVIVGAGGVRPCNLAFGVDQFNPKTESGKRGIDSFFKWYVFTITFSQMISVTLIVFVQSNVSWAIGLGIPAVLMFLACVIYFVGSKIYIKVKATGSPFTGVAQVIVAAIKKRQLKPLDQPWLSLFKYIPPKSINSKLPYTDQFRFLDKVAIVTPQDQLNPDGSPVDPWRLCSMQQVEEVKCMMRVLSIWCSQILYMVALTQQHTYAVFQAVQADRRLGNREFEIPAASYAVFQMLSLTLFIPIYDRVIVPFLRRARGNEGGITILQRVGIGMFLSIITMLVSGIVEQHRRTIALTKPTLGVVPRKGAISSMSALWLIPQLALAGLTEAFANVGLTEFYYKQFPENMRSVAGSLFHCGQAGSSYLSSLLIFIVHLTTKGAWLLEDLNKGRLDYFYYMITGLGVLNLGYFLLCSSWYKYYKANHDTLEPEPEPELQLEANVD

SEQ ID NO: 390 - DNA, 1740 bp, Corchorus capsularis
  source 1..1740: mol_type = other DNA
atggaaaagaacgagaagaaggatgacgaaccagaaatcaattacagaggttggaaagccatgccattcattattggtaacgaaacctttgaaaagttgggtgctattggtgctttgtccaatttggttgtttacttgactaccgtgttcaacttgaagaacattactgctgctaccatgatcaacgttttcgatggtactactaatttcggtactttggttggtgccttcttgtgtgatacttactttggtagatacaagaccttgggtttcgctactattgcttcttttatgggtttgttggccattcaattgacagctgctattccagaattgcatccaccacaatgtgctgctcaaggtgaatgtaatggtccaactgttggtcaaatggcttttttgttgactggtttgggtttagttatagttggtgctggtggtgttagaccatgtaatttggcttttggtgttgaccaattcaacccaaaaactgaatctggtaagagaggtatcgactccttcttcaaatggtatgttttcaccatcaccttcagccaaatgatctctgttactttgatcgtgttcgtccagtctaatgtttcttgggctattggtttaggtattccagctgttttgatgttcttggcttgtgttatctacttcgtcggttctaagatctacattaaggttaaggctactggttctccattcactggtgttgctcaagttatcgttgctgctattaagaagagacagttgaagccattggatcaaccttggttgtctttgttcaagtacattccaccaaagtccatcaactctaagttgccatataccgatcagttcagattcttggataaggttgctatcgttaccccacaagatcaattgaacccagatggttcaccagttgatccttggagattgtgttctatgcaacaagttgaagaggtcaagtgcatgatgagagttttgtctatttggtgctcccagatcttgtacatggttgctttgactcaacaacatacctacgctgtttttcaagctgttcaagcagatagaagattgggcaatagagaattcgaaattccagcagcttcttacgcagttttccaaatgttgtccttgaccttgttcatcccaatctacgatagagttattgtcccatttttgcgtagagctagaggtaatgaaggtggtattactatcttgcaacgtgttggtattggcatgttcttgtccattattaccatgttggtttccggtatcgttgaacaacatagaagaactattgccttgactaagccaactttgggtgttgttccaagaaaaggtgctatctcttcaatgtctgctttgtggttgattccacaattggctttggctggtttgactgaagcttttgctaacgttggtttgacggaattctactacaaacagttcccagaaaacatgagatctgttgctggttctttgttccattgtggtcaagcaggttcttcttacttgtcatccttgttgatcttcatcgtccacttgacaacaaaaggtgcatggttgttggaagatttgaacaagggtagattggactacttttactacatgattacaggtttgggcgttttgaacttgggttactttttgttgtgttcctcctggtacaagtactacaaggctaatcatgataccttggaaccagaacctgaaccagaattacaattggaagccaacgttgactga

SEQ ID NO: 391 - protein, 593 aa, Helianthus annuus
MALKMEGMGINGDAKVEELKQPNYRGVKAMPFVIGNETFEKLGTIGTSTNLLVYLTTIFNMKSITATNLINVFHGTCNFGTLAGAFLSDTYFGRYKVLGAASISSFLGMLVLTLTATLKTLHPPQCVDTFCVGPTPWQMAFLLSGFVFLIIGASGIRPCNLAFGADQFNPNTESGQRGIASFFNWYYFTFTFAMMVSLTIIVYVQANINWAIGLAIPTFLMFLSCAVFFVGTRIYVIVQPDGSPLTSIFQVLVATIKKRKLTIPEEPSLSLFNHVSTKSINAKLPYNNQLKFLNKAAIITTKDNINLDGSSGDRWTLCSIQQIEEVKCVVKTIPIWFACIIYNVSLTNMQTYTVFQALQSDRRLNHSSFKVPAASYTVFQMLALTIWIPVYDRLIVPCLRKITNERQGISLLQRIGVGMGIAIFTMLVAAIIETKRKDMAHSKPTLGIERGKGAISSMSGFWLVCQMVVAGLSEGFAIIGFVEFFYKQFPENMKSFAGSFLFCGFAMSSYLSSFLISIVHRTTREGEGGSRNWLAQDLNDAKLDYFYYLCAGLEVLNFIYYLIVAKWYKYKGSEDLADDVPLKDIPATHKHII

SEQ ID NO: 392 - DNA, 1782 bp, Helianthus annuus
  source 1..1782: mol_type = other DNA
atggccttgaagatggaaggtatgggtattaacggtgatgctaaggttgaagaattgaagcaacctaattacagaggtgttaaggctatgccattcgtcattggtaacgaaactttcgaaaagttgggtactattggcacttctaccaacttgttggtttacttgactacgatcttcaacatgaagtctattactgccaccaacctgatcaatgttttccatggtacttgtaacttcggtactttggctggtgcttttttgtctgatacttacttcggtagatacaaggttttgggtgctgcttctatttcttctttcttgggtatgttggttttgactttgaccgctactttgaaaaccttgcatccaccacaatgtgttgatactttttgtgttggtccaactccatggcaaatggcatttttgttgtctggtttcgtgttcttgattattggtgcctctggtattagaccatgtaatttggcttttggtgccgatcaattcaacccaaatactgaatctggtcaaagaggtattgcctcttttttcaactggtactacttcactttcaccttcgctatgatggtttccttgaccattatcgtttacgttcaagccaatattaactgggctattggtttggctattcccacttttttgatgttcttgtcttgcgccgttttcttcgttggtactagaatctatgttatcgttcaaccagatggttccccattgacttctattttccaagttttggttgccaccatcaagaagagaaagttgactattccagaagaaccctccttgtctttgttcaatcatgtttctaccaagtccatcaacgctaagttgccatacaacaatcagctgaagtttttgaacaaggccgctattattaccaccaaggataacattaacctggacggttcttcaggtgatagatggactttgtgttccatccaacaaatcgaagaggttaagtgtgttgtcaagaccattccaatttggttcgcttgcattatctacaacgttagcttgactaacatgcaaacctacactgtttttcaagccttgcaatccgatagaagattgaaccattcttcattcaaagttccagctgcttcttacaccgttttccaaatgttggctctgactatttggatcccagtttacgatagattgatcgttccatgcttgagaaagatcaccaatgagagacaaggtatctccttgttgcaaagaattggtgttggtatgggcattgctattttcaccatgttggttgctgccatcattgagactaagagaaaagatatggctcactctaaacctaccttgggtattgaaagaggtaaaggcgctatttcatctatgtcaggtttttggttggtttgccaaatggttgttgcaggtttgtctgaaggttttgccattattggtttcgtcgagttcttctacaaacagttcccagagaatatgaagtctttcgccggttcttttttgttttgcggttttgctatgtcctcctacttgtcctcattcttgatttccatcgttcatagaactaccagagaaggtgaaggtggttctagaaattggttggctcaagatttgaacgatgccaagttggattacttctactatttgtgtgctggtttggaggtcttgaacttcatctattatttgattgtcgccaagtggtacaagtacaagggttctgaagatttggctgatgatgttccattgaaggatattccagctactcataagcacatcatctaa

SEQ ID NO: 393 - protein, 590 aa, Handroanthus impetiginosus
MNMEMQEKKIAENEDEPEIINYRGIKAMPFIIGNETFEKLGAIGTLSNLQVYLTTVFNMSRISETTLLNVFNGTTNFATLIGAYLCDTYFGRYKTLGFGSIASFLGLLVITLTAAFKNLHPPHCRPEDTHCIGATPGQMVFLLSGFGLMILGAGAIRPCNLAFGADQFNPNTESGKRGIDSFFNWYFFTITFAQMVSVTLVVYVQTDISWPIGLAIPTIFMLISCFLFFMGTKIYVIVKPEGSPLTGIAQVLAVAARKRRLKLPKQPWLSLFSYAPPKSINSKLPYTEQFRCLNKAAIRTPQDHIEPDGAAANPWRLCTIQQIEELKCILRVIPIWAAAIIYHVGEKQQYIVFQAMQSDRHLARGATTFQIPPATYSIFSMLTLTIFVPIYDRFLVPCLRKLTGKPGGITILQRIGIGIFLTIIESLVSAFVEQKRRDLAISKPLEGIHSNRGAVSPMSGLWFVPQLALAGLAEAFCAIGQVEFFYKEFPENMRSFAGSFFFCGMAAANYLNGFLISLVHKATEGSPAGNWLPEDLNKGRLDYFYYLITGLCALNFVYFLVCAKWYRYKGSGGDGSGVEMGGKDLDKIVV

SEQ ID NO: 394 - DNA, 1773 bp, Handroanthus impetiginosus
  source 1..1773: mol_type = other DNA
atgaacatggaaatgcaagagaaaaagatcgccgaaaacgaagatgaaccagagattattaactacagaggtattaaggccatgccattcattattggtaacgaaacctttgaaaagttgggtgccattggtactttgtctaacttgcaggtttatctgactaccgtgttcaacatgtccagaatttctgaaactaccctgctgaatgttttcaacggtactactaatttcgccaccttgattggtgcttacttgtgtgatacttacttcggtagatacaagaccttaggtttcggttctattgcttctttcttgggtttgttggttattactttgaccgctgctttcaagaacttgcatccaccacattgcagaccagaagatactcattgcattggtgctactccaggtcaaatggtttttttgttgtctggtttcggcttgatgattttaggtgctggtgctattagaccatgtaatttggcttttggtgccgatcaattcaacccaaatactgaatctggtaagagaggtatcgactctttctttaactggtacttcttcaccattaccttcgctcaaatggtgtctgttactttggttgtttacgttcaaaccgatatctcttggccaattggtttggctattccaaccattttcatgctgatctcgtgtttcttgttcttcatgggtactaagatctacgttatcgttaagccagaaggttctccattgactggtattgctcaagttttggctgttgctgctagaaagagaagattgaaattgccaaaacagccctggttgtctttgttttcttatgctccaccaaagtccatcaactctaaattgccatacaccgaacaattcaggtgtttgaacaaagctgcaattagaaccccacaagatcatattgaaccagatggtgctgctgctaatccttggagattgtgtactattcaacagatcgaagagttgaagtgcatcttgagagttattccaatttgggctgcagctatcatctatcatgttggtgaaaaacaacagtacatcgtgttccaagctatgcaatctgatagacatttggctagaggtgctactactttccaaattccaccagctacttactccatcttctctatgttgactttgaccattttcgtcccaatctacgatagatttttggtcccatgtttgagaaagttgacaggtaaaccaggtggtattaccatcttgcaaagaattggtatcggtatcttcttgaccatcatcgagtctttggtttctgctttcgttgaacagaagagaagagatttggccatttctaaaccattggaaggtatccattctaacagaggtgctgtttctccaatgtcaggtttgtggtttgttccacaattggctttagctggtttagctgaagctttttgtgctatcggtcaagtcgaattcttctacaaagaattcccagagaacatgagatctttcgctggttcttttttcttctgtggtatggctgctgccaattacttgaatggtttcttgatttccttggtccataaggctactgaaggttcaccagcaggtaattggttgccagaagatttgaacaagggtagattggactacttctactacttgattactggtttgtgcgctttgaacttcgtttacttcttagtttgtgctaagtggtacaggtacaaaggttctggtggtgatggtagtggtgttgaaatgggtggtaaagatttggataagatcgtcgtctga

SEQ ID NO: 395 - protein, 593 aa, Trema orientalis
MASEQETQERNDKAVTTTESEVQYSGTKSMPFIIGNETCEKLGSIGTSNNLLVYLTTVFNMKAITATTLVNIFNGTCNFAALPGAILSDTYFGRYQTLGFASVASFTGMLVLTLTAAITRLHPPHCVKEKNETCPGPTPWQMAILLSGLGLMVTGAGGIRPCNLAFGADQFNPNTESGKKGINRFFNWYYFGLTFAMMVSFTLIAYVQSNLSWALGLAIPTLLMLLSCVLFFVGSRIYVKVKPNGSPLTGAVRVVVAAVKKRHLKLPEQPWLTLFNHIPTTSINSKLPYSNQFRFLDKAAIIDPKDTVHPDGSAANPWRLCSMQQVEEVKCLMRVIPIWSSAIIYYVAMVQQQTSVVFQALQSDRHLGKTKFKIPAATYSIFTMLGITICIPIYDKIIVPTLRRFTRKESGITLLQRMGFGMVLAVATMLISASVEEKRRSFALTKPIGTAEGRGAISSVSAFWLVPQLTLIGFSEAFTVIGHIEFYYKEFPENMRTISGSFLYIGFAVSNYLSSFLVSLVHHITKTGSGKGDWLPEDLNEGRLDWFYYLVAALEVLNLAYFLMCAKWYNYKGNTSNDIEVDTNNMQSVRPLH

SEQ ID NO: 396 - DNA, 1782 bp, Trema orientalis
  source 1..1782: mol_type = other DNA
atggcctctgaacaagaaacccaagaaagaaatgataaggctgttactaccaccgaatccgaagttcaatattctggtacaaagtccatgccattcatcattggtaacgaaacctgtgaaaagttgggttccattggtacttctaacaacttgttggtttacctgactaccgtgtttaacatgaaggctattactgctactaccctggttaacattttcaacggtacttgtaatttcgctgctttgccaggtgctattttgtctgatacttacttcggtagataccaaactttgggttttgcttctgttgcttctttcactggtatgttggttttgactttgactgctgctattaccagattgcatccaccacattgtgtcaaagaaaagaacgaaacttgtccaggtccaactccatggcaaatggcaattttgttgtctggtttgggtttgatggttactggtgctggtggtattagaccatgtaatttggcttttggtgccgatcaattcaacccaaatactgaatcaggtaagaagggtatcaacaggttcttcaattggtactacttcggtttgactttcgccatgatggtttcttttaccttgattgcctacgtccagtctaatttgtcttgggctttaggtttggctattccaactttgttgatgttgttgtcctgcgttttgttcttcgttggttctagaatctacgttaaggttaagccaaatggttctccattgacaggtgctgttagagttgttgttgctgctgttaagaagagacatttgaagttgccagaacaaccttggttgactttgttcaatcatattccaaccacctccatcaactctaagttgccatattctaaccagttcaggttcttggataaggccgctattattgatccaaaggatactgttcatccagatggttctgctgctaatccttggagattgtgttctatgcaacaagtcgaagaggttaagtgcttgatgagagttattccaatttggtcctctgccatcatctattacgttgctatggttcaacaacaaacctccgttgttttccaagccttgcaatctgatagacatttgggtaagaccaagttcaaaattccagctgctacctactctatcttcaccatgttgggtattaccatctgcattccaatctacgataagatcattgtcccaaccttgagaaggttcaccagaaaagaatctggtatcaccttgctacaaagaatgggttttggtatggttttggctgttgccactatgttgatttctgcttccgttgaagaaaagagaagatctttcgctttgaccaagcctattggtactgctgaaggtagaggtgcaatttcttctgtttctgctttttggttggttccacaactgactttgattggtttttctgaagccttcaccgttatcggtcatatcgaattttactacaaagaattccccgagaacatgaggactatttctggttcattcttgtacattggtttcgccgtttccaactacttgtcctcttttttggtttccttggtccatcatattaccaagactggttctggtaaaggtgattggttgcctgaagatttgaacgaaggtagattagattggttctactacttggttgctgccttggaagtattgaatttggcctactttttgatgtgcgctaagtggtacaattacaagggtaacacctccaacgatatcgaagttgataccaacaacatgcagtctgttagaccattgcattaa

SEQ ID NO: 397 - protein, 527 aa, Basidiobolus meristosporus
MSNEKPDHDKEVNYVDDKIEEQPNPDDIEKRVAGKVPLAAWFIIITELCERFAFYGASLMFQPYMLKMLGFSKGTATAVNRGFQFLAYFTTILGAVVADRYVGKFKTIVIFSLFYMIGLIILALSALPSSLEGSFGIIGFIIALYAFISFGTGGIKSNVSSFAAEQIKEGIFPTKTPGVYIDSQLTVERIFRFFYWAINCGALLGQFICPIVANDYGSYPLAYSLPAIMFVLGLVIFVSAKRLYYVKPPSGTVLSKTYSCIKYALSHRKAPLDNAKTNGPIEHWLDYAKVDGFEWDDSFVEDLKKTLRASLVFLFYPFYWALYYNMSDNFINMGLTMQRPSFISGPEQLNLINSLVLVVAIPIFDTIIFPLLRKMGCRLGPITRITIGFTIATLAFVYVTILQDQVYKTGPYYNFTDLSGLPAGEQPVNDITIWWQIIPFIGIAISEIFASVTGLEFAFRQAAPELKSVVTALFLFTNCGGSLIGLILAIWSNDPNFVYVFGIQTGLMGVMTIIFYWLFRKYDAIDC

SEQ ID NO: 398 - DNA, 1584 bp, Basidiobolus meristosporus
  source 1..1584: mol_type = other DNA
atgtccaacgaaaagccagaccacgacaaagaagttaattacgttgacgacaagatcgaggaacaacctaatccagatgatatcgaaaaaagagttgctggtaaagttccattggctgcctggtttattatcattaccgaattgtgtgaaaggttcgctttttacggtgcttctttgatgttccaaccttacatgttgaagatgttgggtttctctaaaggtactgctaccgctgttaatagaggttttcaattcttggcttacttcaccactattttgggtgctgttgttgctgatagatacgtcggtaaattcaagaccatcgtcatcttcagcttgttctacatgattggcttgattatcttggctttgtctgctttgccatcttctttggaaggttcctttggtattatcggtttcattattgccttgtacgccttcatttcttttggtactggtggtatcaagtccaacgtttcttcttttgctgccgaacaaatcaaagagggtattttcccaacaaaaaccccaggtgtttacatcgattctcaattgaccgttgaaaggatctttaggtttttctactgggccattaactgtggtgctttgttgggtcaattcatttgtccaatcgttgccaatgattacggttcttacccattggcttattccttgccagctatcatgtttgttttgggtttagtcattttcgtgtccgctaaaaggttgtactatgttaagccaccatctggtactgttttgtctaagacttactcctgcattaagtacgccttgtctcatagaaaagctccattggataatgctaagaccaatggtccaatagaacactggttggattacgctaaagttgatggttttgaatgggatgactccttcgttgaggatttgaaaaaaaccttgagagcctccttggtgtttttgttttatccattttattgggccctgtactacaacatgtctgacaactttattaacatgggcttgaccatgcaaaggccatcttttatttctggtccagaacagttgaacctgatcaactctttggttttggttgttgccattccaatcttcgataccatcatcttcccactgttgagaaaaatgggttgtagattgggtccaattaccagaattactatcggttttaccattgctaccttggcctttgtttacgttaccatattgcaagaccaagtctacaagactggtccttactacaatttcactgacttgtctggtttacctgctggtgaacaaccagttaacgatattactatttggtggcaaatcatccccttcattggtattgccatttccgaaattttcgcttctgttaccggtttggaattcgcttttagacaagctgctcctgaattgaagtctgttgttactgctttgttcctgtttaccaattgtggtggttcattgatcggtttgattttggctatttggtccaacgatccaaacttcgtttacgttttcggtatccaaactggtttgatgggtgttatgaccattatcttctattggctgttcagaaagtacgatgccattgattgctga

SEQ ID NO: 399 - protein, 468 aa, Encephalitozoon hellem
MNRRTTLFLIICNEFCERFCYYGLRSLLFSFSREEYNFTTKESTMTLHFFVSMSYLFTLLGGLLSDMFLGRYNTIVALSSLYLTGTSLLTYCSVVSASPRLLMASLLMIAVGTGGIKPCVAAFGGDQFGVDETQDLRKFFNFFYFAINIGSMVSTVLTPVMSDTTCFGKNSCYPLAFGASSTLLGASIILFVIGTNLYVIKPAKKEQFSRSFRSLAQNVKKLLWRQDGHDEKTSTLQTASEAVSEACEEDDKKKTLKILRILGPAVLFWALYDQQSSSWIEQGSKMDSRQRILGHDIDILPSQMQAFNSVFILLFIPMFSKLVYPLLGRIGILSSPEEKMGAGIVLASLSFFCSGYIEYKITLAESVGQKLSILWQVPQYVIVTAGEIMLNVTGMEYMYAEAPETMKSLVLSMWLLTVTAGNLLVMGITLLDPIALVSSRTHDMWSFIMYGIAGLAASRYMFQASRPI

SEQ ID NO: 400 - DNA, 1407 bp, Encephalitozoon hellem
  source 1..1407: mol_type = other DNA
atgaacagaaggaccaccttgttcttgatcatctgtaacgaattctgcgaaaggttctgttactacggtttgagatctctgttgttctcattctcaagagaagagtacaacttcaccaccaaagaatctactatgaccttgcacttcttcgtgtctatgtcttacttgttcactttgctaggtggtttgttgtccgatatgtttttgggtagatacaacactatcgtcgccttgtcatcattatacttgactggtacttctctgttgacctactgttctgttgtttctgcttctccaagattattgatggcctccttgttgatgattgctgttggtactggtggtattaagccatgtgttgctgctttcggtggtgatcaatttggtgttgacgaaactcaagacttgaggaagtttttcaacttcttctacttcgccatcaacatcggttctatggtttctactgttttgaccccagttatgtctgataccacttgttttggtaagaactcttgttaccctttggcttttggtgcttcttcaactttgttgggtgcttccattatcttgttcgttatcggtacaaacctgtacgttatcaagccagctaagaaagaacaattctccagatcctttagatccttggctcaaaacgtcaaaaagttgctttggagacaagatggtcatgacgaaaaaacttctaccttgcaaactgcttctgaagctgttagtgaagcttgtgaagaagatgacaagaaaaagaccttgaagatcctgagaattttgggtccagctgttttgttttgggccttgtatgatcaacaatcctcctcatggattgaacagggttctaaaatggactccagacaaagaatattgggtcacgatattgacatcttgccatctcaaatgcaagctttcaactccgttttcatcttgttgttcatccccatgttctccaaattggtctatccattattgggtagaatcggcattttgtcctcacctgaagaaaaaatgggtgctggtatagttttggcctctttgtcttttttctgctccggttacattgagtacaagattactttggctgaatccgtcggtcaaaagttgtctattttgtggcaagttccacaatacgttatcgttactgctggtgaaatcatgttgaacgttactggtatggagtatatgtatgctgaagctccagaaaccatgaagtctttggttttgtctatgtggttgttgactgttaccgctggtaatttgttggttatgggtattaccttgttggacccaattgctttggtttcttctagaactcatgacatgtggtcgttcattatgtatggtattgctggtttggctgcttctaggtatatgtttcaagcttctagacccatctaa

SEQ ID NO: 401 - protein, 515 aa, Mortierella elongata
MPKACYFILPNEFGERFCYYGVQPNLNKYFQLITGMNPTNAKVYSTAFTMLAYFFPLIGAALSDSFLGKWWTIIGFSTVYLIGMIMVTVFAIPNLIGPIGQVSNFLTFLPMLVIAIGTGGIKPCVSSHGGDQYLPSQEAGKDLFFNIFYVSINVGALLTQFIVPKMTELKCYGQDTCYAGAFLLPTVVFALAFAIFCAGHKFYRIVPPLGEFLPLKAVQASLLAARRHRAASPQERAAKGHWLNFAEAEYGGVFIEEVRDFGLVLVPVVIPFAFCWMLYNQNSNEWANQYYLMSGALFGGNDETASYVQGAMFGNVNTILIILWVPFLATFVYPFCTKRGWNFSPQRRMGLGFLVVVISFAVSAALAPSVEKAYLESGRLMKDAAKYDGKYCEKCYSAWWQLPQWILLSLGEALFSPTGVQFTYIEAGRQFRAVSTSFWLLATSFGSILIMIFEPVFAGYNLSSGTKGWAYSGIGLFGFLLYCVTSYYYVPRKVRPSINEAARLAKKAEYAITSY

SEQ ID NO: 402 - DNA, 1548 bp, Mortierella elongata
  source 1..1548: mol_type = other DNA
atgccaaaggcctgctacttcattttgccaaacgaatttggtgaaaggttctgctattatggtgttcagccaaacttgaacaagtacttccaattgattaccggtatgaacccaactaacgctaaggtttattctactgctttcaccatgttggcctacttttttccattgattggtgctgctttgtccgactcttttttaggtaaatggtggaccattatcggtttctctaccgtttatttgatcggtatgatcatggttaccgttttcgctatcccaaatttgattggtccaatcggtcaagtctctaacttcttgacttttttgcccatgttggttattgccattggtactggtggtattaagccatgtgtttcttctcatggtggtgatcaatatttgccatctcaagaagctggtaaggacttgttcttcaacatcttctacgtttccattaacgttggtgctttgttgacccaattcatcgttccaaaaatgaccgaattgaagtgctacggtcaagatacttgttatgctggtgcttttttgttgccaactgttgtttttgctttggccttcgctattttttgtgctggtcataagttctacagaatcgttccaccattgggtgaatttttgccattgaaagctgttcaagcttctttgttggctgctagaaggcatagagctgcttctccacaagaaagagctgctaaaggtcattggttgaactttgctgaagctgaatatggtggtgtgttcattgaagaagtcagagattttggtttggttttggttccagttgttatcccatttgctttctgttggatgctgtacaatcagaactctaacgaatgggctaatcagtactatttgatgtctggtgcattattcggtggtaatgacgaaactgcttcttatgttcaaggtgctatgttcggtaacgttaacaccattttgatcatcttgtgggttccattcttggctacttttgtttacccattctgtactaagagaggctggaatttttcaccacaaagaagaatgggtttgggtttcttggttgttgttatttcctttgctgtttcagctgctttggctccatctgttgaaaaagcttatttggaatccggtaggttgatgaaggatgctgctaaatatgatggcaagtactgtgaaaagtgttactctgcttggtggcaattaccacaatggattttgttgtctttgggtgaagctttgttttctccaactggtgttcaattcacctacattgaagcaggtagacaattcagagctgtttctacttctttctggttattggctacctccttcggttctatcttgattatgattttcgaaccagttttcgccggctacaatttgtcatctggtacaaaaggttgggcctattctggtattggtttgttcggtttcttgctgtactgtgttacttcctattactacgttccaagaaaggtcagaccatctattaacgaagctgctagattggctaaaaaggctgaatacgctattacctcctactaa

SEQ ID NO: 403 - protein, 573 aa, Nicotiana sylvestris
MEKIDKEATKSEIMRYRGIRAMPFIIGNETFEKLGTIGSSSNLLVYLTSIFHLKTITATNIINIFNGTCNFGTLLGAFLSDTYFGRYRTLGFASVSSFLGMLVLTLSAAISRMHPPVCGNQEAASCVGPTTKQMTFLLIGFGLLVIGSSGIRPCNLAFGADQFDPNTAPGRKGISSFFNWYYFSLTFAMMVSLTVIVYVQSNISWSLGLAIPTIMMFLSCALLFAGTKIYVRMVPKGSPLSSVEQVFVAAFKKRHLQLAEQPCVALFNYVSSDSLNSKLCYTDQFRFLNKAAIRTPEDEINSDGSAADPWRLCSIQQVEEVKCLLRVVPIWVAGTVYYVSVVQQQNYVIFQAFQSNRQLGHNHFRIPPASFIVFPFLCISIWLPIYDRILLPWLRKFTRKEDGITLLQKMGIGMFISIITMIISAIVEDRRRSLALTRPTLGITQGKGAISSLSGLWLIPQMTLSGLTEALTLFSESEFFYKQCPENMRSIAGSFLFVGMAGSSYLSSLFSSVVHKTSNWLAEDLNKGRLDYFFYLIAVLQILNLGYFLLCAKWYKYKEAGSNTKLSESKEQS

SEQ ID NO: 404 - DNA, 1722 bp, Nicotiana sylvestris
  source 1..1722: mol_type = other DNA
atggaaaagatcgacaaagaggccaccaagtctgaaattatgagatacagaggtattagggccatgccattcattattggtaacgaaactttcgaaaagctgggcactattggttcctcttctaatttgttggtttacctgacctccatcttccacttgaaaactattactgccaccaacatcatcaacattttcaacggtacttgcaacttcggtactttgttgggtgcttttttgtctgatacttacttcggtagatacaggactttgggttttgcttctgtttcttctttcttgggtatgttggttttgactttgtccgctgctatttctagaatgcatccaccagtttgtggtaatcaagaagctgcatcttgcgttggtccaactacaaaacaaatgaccttcttgttgatcggtttcggcttgttggttattggttcttctggtattagaccatgcaatttggcttttggtgctgatcaatttgatccaaatactgctccaggtagaaagggtatctcttcttttttcaattggtactacttctccttgaccttcgctatgatggtttctttgactgttatcgtctacgtccagtctaacatctcttggtctttaggtttggctattcccaccattatgatgttcttgtcttgtgctttgttgttcgctggtactaagatctacgttagaatggttccaaagggttctccattgtcatctgttgaacaagtttttgttgctgccttcaagaagagacacttgcaattggctgaacaaccatgtgttgctttgttcaactacgtttcctctgactctttgaactctaagttgtgttacaccgaccagttcagatttttgaacaaggctgctattagaaccccagaagatgagattaactctgatggttctgctgctgatccttggagattgtgttctattcaacaagttgaagaggtcaagtgcttgttgagagttgttccaatttgggttgctggtactgtttattacgtttccgttgtgcaacaacagaactacgttattttccaagccttccaatccaacagacaattgggtcataaccatttcagaattccaccagcttcattcatcgttttcccattcttgtgcatttccatttggttgccaatctacgacagaattttgttgccatggttgagaaagttcaccagaaaagaagatggtatcaccctgttgcaaaagatgggtattggtatgttcatctccatcatcaccatgattatttccgccatcgttgaagatcgtagaagatctttggctttgactagaccaactttgggtattactcaaggtaaaggtgccatctcttcattgtctggtttgtggttaattccacagatgaccttatctggtttgaccgaagctttgacgttgttctctgaatctgaattcttctacaagcagtgcccagaaaacatgagatctattgctggttcctttttgtttgttggtatggcaggttcttcctacttgtcctctttattctcttcagttgttcacaagacctctaactggttggctgaagatctaaacaaaggtcgtttggattacttcttctacttgattgccgtcttgcagattttgaacttgggctactttttgttgtgtgccaaatggtacaagtacaaagaagctggttctaacaccaagctgtccgaatctaaagaacagtcttga

SEQ ID NO: 405 - protein, 578 aa, Capsicum annuum
MEETNKEATKDEIKYRGIRAMPFVIGNETFEKLGTIGSSSNLLVYLTSIFHLKTITATNIVNIFNGTCNFGTLLGAFLSDTYFGRYNVLAFASVSSFLGMLVLSFTASVSKLHPPECENQGTAPVCVGPTTGQLTFLLGGFGLLVIGASGIRPCSLAFGADQFDPNTESGRRGISSFFNWYYFTRTFAVMVSLTVIVYVQTNISWSLGLAIPAIIMFLSCALFFVGTNIYVRFVPKGSPLSSVAQVLVAAFKKRHLQLPQQPCFSLFNYVPSNSLNSMLPYTDQFRFLNKAAIKTPEDQINSSDGSAVNPWRLCSIQQVEEVKCLLRVIPIWVAGTIYYVSVVQSQNYVIFQALQSDNQLGHINFHIPPASFIVISMLSITIWLPIYDRVLLPWLRKFTGKEDGITLLQKMGIGIFLSIVTMVISGIVEDKRRTLAITRPMLQMTQGKGAISSMSGLWLIPQLALLGLSEAFTLISENEFFYKQCPENMRSIAASLFFVGMAGSSYLSSFLASLVHKTSSWLDEDLNKGKLDYFYYLIAALEILNLGYFLVCAKWYKYKGRAGDNKVRERKDQNEIVM

SEQ ID NO: 406 - DNA, 1737 bp, Capsicum annuum
  source 1..1737: mol_type = other DNA
atggaagagactaacaaagaagctaccaaggacgaaatcaagtacagaggtattagagctatgccattcgtcattggtaacgaaactttcgaaaagttgggtacgattggctcctcttctaatttgttggtttacctgacctccatcttccacttgaaaactattactgctaccaacatcgtcaacattttcaacggtacttgtaacttcggtactttgttgggtgctttcttgtctgatacttacttcggtagatacaacgttttggctttcgcttctgtttcttctttcttgggtatgttggttttgtctttcactgcctctgtttctaaattgcatccaccagaatgtgaaaatcaaggtactgctccagtttgtgttggtccaactactggtcaactgacttttttgttaggtggttttggcctgttggttattggtgcttctggtattagaccatgctctttggcttttggtgctgatcaatttgatccaaacactgaatctggtagaaggggtatctcttcttttttcaattggtactacttcaccagaaccttcgctgttatggtttctttgactgttatcgtctacgttcagaccaacatctcttggtctttgggtttagctattccagccattatcatgttcttgtcttgtgccttgtttttcgtcggtacaaacatctacgttagattcgttccaaagggttctccattgtcatctgttgctcaagttttggttgctgcttttaagaagagacacttgcaattgccacaacagccatgtttttctttgttcaactacgtcccatccaacagcttgaattctatgttgccatacaccgaccaattcaggtttttaaacaaggctgctattaagaccccagaggatcaaatcaattcttctgatggttctgctgttaacccttggagattgtgttctatccaacaagtcgaagaggttaagtgcttgttgagagttattccaatttgggttgctggcactatctactacgtttcagttgttcaatcccagaactacgttattttccaagccttgcaatccgacaatcaattgggtcatatcaacttccatattccaccagcttcattcatcgtcatctccatgttgtctattaccatttggttgccaatctacgacagagttttgttgccatggttgagaaagttcaccggtaaagaagatggtatcaccttgttgcaaaaaatgggtatcggtatcttcttgtccatcgttaccatggttatttccggtatcgttgaagataagagaagaaccttggctattaccagaccaatgttgcaaatgactcaaggtaaaggtgccatctcttctatgtctggtttgtggttgattccacaattggctttattgggtttgtctgaagctttcaccttgatctctgaaaacgagttcttctacaaacagtgcccagaaaacatgagatctattgctgcctctttgttctttgttggtatggctggttcttcctacttgtcatcttttttggcttcattggttcacaagacctcttcatggttggatgaagatttgaacaagggcaagttggactacttctactatttgattgccgccttggaaattttgaacttgggttactttttggtttgcgccaagtggtataagtacaaaggtagagctggtgataacaaggtcagagaaagaaaggatcaaaacgagatcgtcatgtaa

SEQ ID NO: 407 - protein, 594 aa, Aquilegia coerulea
MEKNDDDKKVHHDIEDHVDKQKINYRGVKAMPYIIGNETFEKLGTIGTSSNMVVYLTTVFNMKSASATTLVNVFNGTTNFAPLIGAFLSDAYFGRYKTLGFASISSLTGMFVIMLTAAITKLHPPHCGTKDTGHCIGPTTLQFAFLLLGFAFLVVGAGGIRPCNLAFGADQFNPNTESGKRGINSFFNWYYFTFTFAMMVSVTLIVYVQSDINWAIGLAIPTFLMFLSCATYFVGSRIYVKVKPEGSPLGRVVQVFVAAKKKRRLKLPENPHLSLFSYQPTGSINASLPYTDQFRFLDKAAIITPEDSIKPDGSAVDPWRLCGMQQVEEVKCIMRVIPIWASGIIYYTAIVQMHTYVVLQALQSDRRLGGSGFEVPAASYIVFAMVGLTFWIPIYDRIIVPTLRKFTGKEGGITLLQRMGIGIVLSITTMLVSAVVEVRRRNYALTRPTLGIAKSGGAISSMPGLWLSPQLLLAGLSEAFDSVGQIEFYYKQFPENMRSIAGSFFFLTMAGANYLSGFLVSLIHRVTANSPTGNWLPDDLNKGRLDYFYYLFAALGILNFGYFLVCARWYRYKGTGGVTIELANESTPTEKHIV

SEQ ID NO: 408 - DNA, 1785 bp, Aquilegia coerulea
  source 1..1785: mol_type = other DNA
atggaaaagaacgacgacgacaagaaggttcatcacgatattgaagatcacgtcgacaagcaaaagatcaattacagaggtgttaaggccatgccttacattattggtaacgaaacctttgaaaagctgggtactattggcacttcttccaatatggttgtttacttgactaccgtgttcaacatgaagtctgcttcagctactactttggtcaatgttttcaatggcactaccaatttcgctccattgattggtgcttttttgtccgatgcttacttcggtagatacaagactttgggtttcgcctctatttcttctttgactggtatgttcgttatcatgttgactgctgctattaccaaattgcatccaccacattgtggtactaaggatactggtcattgcattggtccaactacattgcaatttgctttcttgttgttgggcttcgcctttttggttgttggtgctggtggtattagaccatgtaatttggcttttggtgccgatcaattcaacccaaatactgaatctggtaagaggggtatcaactcttttttcaactggtactacttcactttcaccttcgctatgatggtttctgttaccttgatcgtttacgtccaatccgatattaactgggctattggtttggctattcctacctttttgatgttcttgtcttgtgccacttacttcgttggttctagaatctacgttaaggttaagccagaaggttctccattgggtagagttgttcaagtttttgttgctgccaagaagaagagaagattgaagttgccagaaaacccacacttgtctttgttttcttatcaacctaccggttctatcaacgcttctttgccatatacagaccagtttagattcttggataaggccgctattattaccccagaagattctatcaaaccagatggttctgctgttgatccttggagattgtgtggtatgcaacaagttgaagaggttaagtgcatcatgagagttattccaatttgggcctctggtattatctactacactgctatagttcagatgcacacttacgttgttttacaagccttgcagtccgatagaagattaggtggttctggttttgaagttccagctgcttcttatatcgttttcgctatggttggtttgaccttctggattccaatctacgatagaattatcgtcccaaccttgagaaagttcactggtaaagaaggtggtatcaccttgttgcaaagaatgggtattggtatcgttttgtccattaccaccatgttggtttcagctgttgttgaagttagaagaagaaactacgctttgactagaccaactttgggtattgctaaatctggtggtgctatttcatctatgccaggtttgtggttgtctccacaattgctattggctggtttgtctgaagcttttgattccgttggtcaaatcgagttctactacaaacaattcccagagaacatgagatccattgccggttctttctttttcttgactatggctggtgctaactacttgtctggttttttggtttccttgatccatagagttactgctaattctccaactggtaattggttgccagatgatttgaacaaaggcagattggactacttctactacttgtttgctgccttgggtattttgaacttcggttactttttagtttgcgccagatggtacagatacaaaggtactggtggtgttactattgaattggctaatgaatctaccccaaccgaaaagcacatcgtttaa

SEQ ID NO: 409 - protein, 601 aa, Argemone mexican
MEKEEKQKAVIDMAIDEHELSSNNKVKYRGVKAMPFIIGNETFEKLGTIGTSSNLTVYLTTVFNMKSVSAATLMNVFNGTTNFAPLIGAFLSDSYFGRYKTLGFASISSFMGMLVITLTAAISKLHPQHCDIKNTEICNGPTHWQLTFLLTGFGFLIVGAGGIRPCNLAFGADQFNPNTESGKRGINSFFNWYYFTFTFAMMVSLTFIVYVQSSINWAIGLAIPTFLMFLSCAFFFIGTRIYVIVKPEGSPLTSIAQVVVAATKKRRLNLHEFSLFNYNPINSINSRLPFTDQFRFLDKAAIITVDDKINPDGSAENPWRLCRMQQVEEVKCLMRIIPIWASGIIYYVAIVQQNTYAVFQALQSDRHLGHQKFQVPAASYVVFMFLSLTIWIPIYDQIIVPSLRKITKKEAGITLLQRMGIGIVLSILTMFVSGLVEERRRHYFSNTNPSLGIAPGGGGISSMSGLWLIPQLTLAGLSEAFNSIGQVEFYYKQFPENMRSIAGSFFFLSMAGANYLSGFMVSIVHRTTNDAKTGNWLAEDLNKGKLDYFYYMIAGLGVINFGYFLVCARWYRYKGTVKSSSDDDSIEMAMETTKQPEKQLV

SEQ ID NO: 410 - DNA, 1806 bp, Argemone mexican
  source 1..1806: mol_type = other DNA
atggaaaaagaagagaagcaaaaggccgttattgatatggccattgacgaacatgaactgtcctctaacaacaaggttaagtacagaggtgttaaggccatgccattcattattggtaacgaaacctttgaaaagctgggtactattggcacttcttctaacttgactgtttacttgactaccgtgttcaacatgaagtctgtttctgctgctactctgatgaatgttttcaatggtactaccaacttcgccccattgattggtgcttttttgtctgattcttacttcggtagatacaagactttgggtttcgcctctatttcttctttcatgggtatgttggttattaccttgaccgctgctatttctaagttgcatccacaacattgcgatatcaagaacaccgaaatatgtaacggtccaactcattggcaactgacttttttgttgactggttttggtttcttgatcgttggtgctggtggtattagaccatgtaatttggcttttggtgccgatcaattcaacccaaatactgaatctggtaagaggggtatcaactctttctttaactggtactacttcactttcaccttcgccatgatggtttctttgactttcatcgtttacgtccagtcctctattaactgggctattggtttggctattccaacctttttgatgttcttgtcttgcgcattcttcttcattggtactcgtatctacgttatcgttaagccagaaggttctccattgacttctattgctcaagttgttgttgctgctaccaaaaagagaagattgaacttgcacgagttcagcttgtttaactacaacccaatcaactccatcaactctagattgcctttcactgaccaattcagattcttggataaggctgccattattaccgttgatgataagattaacccagacggttctgctgaaaatccttggagattgtgtagaatgcaacaagttgaagaggtcaagtgcttgatgagaattattccaatttgggcctccggtatcatctattatgttgctatagttcaacagaacacctacgctgttttccaagctttacaatccgatagacatttgggtcaccaaaagtttcaagttccagctgcttcttacgtcgtctttatgtttttgtctttgaccatctggatcccaatctacgatcaaattatcgtcccatccttgagaaagatcaccaagaaagaagctggtatcaccttgttgcaaagaatgggtattggtatcgtcttgtccattttgaccatgttcgtttctggtttggttgaagaaagacgtagacactacttctctaacactaatccatctttgggtattgctccaggtggtggtggaatttcttctatgtctggtttgtggttgattccacaattgactttggctggtttgtctgaagctttcaactcaattggtcaagtcgagttctactacaagcaattcccagaaaacatgagatccattgccggttcttttttctttttgtctatggctggtgccaactacttgtcaggttttatggtttctatcgtccatagaactaccaacgatgctaaaactggtaattggttggctgaggatttgaacaagggtaaattggactacttttactacatgatcgctggtttgggtgttatcaatttcggttactttttggtttgcgctagatggtacagatacaagggtactgttaagtcctcttccgatgatgattctatcgaaatggctatggaaactaccaagcaaccagaaaagcaattggtctga

SEQ ID NO: 411 - protein, 583 aa, Argemone mexican
MVLVESSGDKDSSGLVDFQGNPVDNSRTGGWLAAGLILGTELSERICVMGISMNMVTYLVGDMHLSSSKSANIVTNFMGTLNILGLLGGFLADAKLGRYLTVATFASITALGVALLTVSTSISGLRPPPCDDSRKNTCVQANGSQLAMLYLSLYIIALGGGGIKSNVSGFGSDQFDASNPKEQKAMVYFFNRFYFCISLGSLFSVTILVYIQDNVGRGWGYGISAGTMIIAVAVFLGGTKLYRFRKPQGSPLTTIWRVVYLAWKKRNLSFPSHDSFLNECNTSKVAHTQRLRCLDRAAILDDKVVSSGNTNNPWLVSTVMEVEEVKMVLQLIPIWSTCILFWTIYSQMNTFTIEQATFMNRNIGSFEVPAGSFSVFLFLTILLFTSLNEKLFVPMARKITRKPQGLTSLQRVGIGLVFSVAGMTASAIVEKRRRQMAVQENNQITAFWLVPQFFIVGAGEAFAYVGQLEFFIREAPERMKSMSTGLFLSTLAMGFFVSSLLVTLVVAATGKSWLRNNLNKGKLENFYWMLAVLGVINFLVFLAFARNHQYKVQKSEGPANDQEKELTHWQGEAIVDIEKKAVC

SEQ ID NO: 412 - DNA, 1752 bp, Argemone mexican
  source 1..1752: mol_type = other DNA
atggtcctggttgaatcctctggtgataaggattcttctggtttggttgattttcaaggtaacccagttgataactctagaactggtggttggttggctgctggtttgattttgggtactgaattgtctgaaagaatctgcgttatgggcatctctatgaacatggttacttacttggttggtgacatgcacttgtcctcttctaaatctgctaacatcgttaccaacttcatgggcactttgaacatcttgggtttgttaggtggttttttggctgatgctaaattgggtagatacttgactgttgctaccttcgcttctattactgctttgggtgttgctttgttgaccgtttctacttccatttctggtttaagaccaccaccatgtgatgactcaagaaagaatacttgtgttcaagccaacggttctcaattggctatgttgtatttgtccttgtacattatcgctttaggtggtggtggcattaagtctaatgtttcaggttttggttccgatcaattcgatgcttctaaccccaaagaacaaaaggctatggtttacttcttcaacaggttctacttctgcatctctttgggttctttgttctccgttactatcttggtttacatccaagataacgttggtagaggttggggttatggtatttctgctggtactatgattattgccgttgccgttttcttaggtggtactaagttgtacagattcagaaagccacaaggttctccattgactactatttggagagttgtttacttggcctggaagaagagaaatttgtctttcccatctcacgactcgttcttgaatgaatgtaacacttctaaggttgctcacacccagagattgagatgtttggatagagctgctattttggatgacaaggttgtttcttcaggcaacactaacaatccatggttggtttctactgtcatggaagttgaagaggttaagatggtcttgcaattgattccaatttggtctacctgcattttgttctggactatctactctcaaatgaacaccttcaccattgaacaagctaccttcatgaacagaaacatcggttcttttgaagttccagctggttctttctctgtgttcttgtttttgacgatcctgttgttcacctccttgaacgaaaagttgtttgttccaatggccagaaagatcaccagaaaacctcaaggtttgacttccttgcaaagagttggtatcggtttggttttttctgttgctggtatgactgcttctgctatcgttgaaaaaagacgtagacaaatggccgtccaagaaaacaatcaaattaccgctttttggttggtcccacaatttttcatagttggtgctggtgaagcttttgcttatgttggtcaattggaattcttcatcagagaagctccagaaaggatgaagtctatgtctacaggtttgttcttgtctactttggctatgggtttcttcgtgtcatctttgttggttacattggttgttgctgctactggtaaatcttggttgagaaacaatttgaacaagggcaagttggagaacttctattggatgttggctgttttgggtgtgattaacttcttggtgtttttggcctttgctaggaatcatcagtacaaggttcaaaagtctgaaggtccagctaacgaccaagaaaaagaattgactcattggcaaggtgaagccatcgttgatattgaaaaaaaggctgtctgctaa

SEQ ID NO: 413 - protein, 607 aa, Tripterygium wilfordii
MEKSDSSRRETMEKNGKKTMNIEKSITTETHENPKINYRGWKAMPFIIGNETFEKLGAIGTLSNLLIYLTTVFNMKSITAATIINIFNGTTNFGTFIGAFLCDTYFGRYKTLGFATVASFLGLLVIQLTAAISSLHPKHCGNDEIRCQAPSVGQMAFLMCGFGLLIIGAGGVRPCNLAFGADQFNPGTEAGKRGINSFFNWYFFTFTFAQMVSLTLIIYVQSNISWALGLGIPAALMLISCALFFMGSKIYVKVKATGSPMTSVVQVLVVSFKKRHLKPLEQPWESLFHYIPSSSINSKLPYSDQFRFLDKAAIRTQEDGINPDGSPTNPWKLCSIQQVEEVKCLLRVIPIWVAAIFYHIANVQQHTYVVFQALQMDRSLGKSSFKIPAASYSVFLMLSMTIWIPIYDRIVVPFLRRITGKQGGITLLQRMGVGMFLAAVTMLVSAAVEERRRTIALTEHTLGIVPRRGTISSMSGLWLIPQLTIAGLSEAFGAIGQVEFYYKQFPENMRSIGGSLFFCGMAGSSYLSSLLITIIHQATKGAPTGNWLPEDLNKGRLDYFYYLIAALEFVNFGYFLMCSRWYKYKGGRDSNSIHVNGEMKEPEKSSV

SEQ ID NO: 414 - DNA, 1824 bp, Tripterygium wilfordii
  source 1..1824: mol_type = other DNA
atggaaaagtccgactcctctagaagagaaactatggaaaagaacggcaaaaagaccatgaacatcgaaaagtctattaccactgaaacccacgaaaacccaaagattaactacagaggttggaaagccatgccattcattattggtaacgaaacctttgaaaagttgggtgccattggtactttgtccaatttgttgatctacctgactaccgtgttcaacatgaagtcaattactgctgccaccatcatcaacattttcaatggtactaccaacttcggcactttcattggtgcttttttgtgtgatacttacttcggtagatacaagaccttgggttttgctactgttgcttcttttttgggtttgttggttattcaattgaccgccgctatttcttccttgcatccaaaacattgtggtaacgacgaaattagatgtcaagctccatctgttggtcaaatggcatttttgatgtgtggtttcggcttgttgattattggtgctggtggtgttagaccatgtaatttggcttttggtgctgatcaattcaacccaggtactgaagctggtaaaagaggtattaactctttcttcaactggtacttcttcaccttcactttcgctcaaatggtttctttgaccttgatcatctacgtccagtctaatatttcttgggctttaggtttgggtattccagctgctttgatgttgatttcctgtgctttgtttttcatgggctctaagatctacgttaaggttaaggctactggttctccaatgacttctgttgttcaagttttggtcgtgtccttcaagaagagacatttgaaaccattggaacaaccatgggaatccttgttccattacattccatcctctagcatcaactctaagttgccatattctgaccagttcagattcttggataaggctgctattagaacccaagaagatggtatcaatccagatggttcaccaactaatccatggaagttgtgctctatccaacaagttgaagaggttaagtgcttgttgagagttattccaatttgggttgctgccatcttctaccatattgctaatgttcaacaacacacctacgttgttttccaagccttgcaaatggataggtctttgggtaaatcctcattcaaaattccagccgcttcttactctgtgttcttgatgttgtctatgaccatttggatcccaatctacgatagaattgtcgtcccattcttgagaagaatcactggtaaacaaggtggcattaccttgttgcaaagaatgggtgttggtatgtttttggctgctgttactatgttggtttctgctgctgtagaagaaagaagaagaactattgctttgaccgaacataccttgggtatagttcctagaagaggtacaatctcttctatgtctggtttgtggttgattccacaattgactattgctggtttgtctgaagctttcggtgctattggtcaagttgaattctactacaagcagttcccagaaaacatgagatctattggtggttctttgttcttctgtggtatggctggttcttcttacttgtcctctctgttgattaccattattcatcaagctactaagggtgctccaactggtaattggttgccagaagatttgaacaagggtagattggactacttctactacttgattgctgccttggaatttgtcaacttcggttacttcttaatgtgctctagatggtacaagtacaaaggtggtagagactccaactccattcatgttaatggtgaaatgaaggaacccgagaagtcctctgtttaa

SEQ ID NO: 415 - protein, 624 aa, Swietenia mahagoni
MRGGERESTGGQTMEKNQRESVDQKENETLEKNENGSMEQDEKAVGNGDREPKINYRGWKAMPFIIGNETFEKLGAIGTLANLLIYLTSVFNMKTITAATLINIFNGTTNFGTMIGAYLCDTYFGRYKTLGFATFTSFLGLQVIQLTAAIPSLHPHRCGSENSTCKGPTAGQMAFLLGGFGLMIIGAGGVRPCNLAFGADQFNPKTESGKRGINSFFNWYFFTFTFAQMVSVTLIVYVQSNVSWAIGLAIPALLMLISCALFFMGSKIYVKVKATGSPMTSVAQVIVVSIKKRRLNKPEQPWLSLFNYIPPTSINSKLPYTDQFRFFDKAAIVTPEDQINPDGSAANPWRLCSMQQVEEVKCILRVLPIWVAGVVYHLIVVQQNTYAVFQAQQTDRRLANSNFKIPAASYVVFLMLGMTLWIPVYDRIMVPFLQRLTRKEGGITVLQRMGIGIGISVITMLVSAFVEERRRTIALTKPTVGFQPRRGAISSMSGMFLIPQLALAGLAEAFTAIGQVEFYYKQFPENMRSIAGSIFFCGLAGSSYLSSLLIAIVHKTTEGAATGNWLPEDLNKGRLDYFYYIIAGFEVLNFCYFLACARWYKYKDTGSDTTEANGEKKQSDTTVA

SEQ ID NO: 416 - DNA, 1875 bp, Swietenia mahagoni
  source 1..1875: mol_type = other DNA
atgagaggtggtgaaagggaatctactggtggtcaaactatggaaaagaaccagagagaatccgtcgaccaaaaagaaaacgaaactttggagaagaacgagaacggttctatggaacaagacgaaaaagctgttggtaatggtgatagagaacccaagattaactacagaggttggaaagctatgccattcattattggtaacgagacattcgaaaagttgggtgctattggtactttggctaacttgttgatctacctgacttccgttttcaacatgaagactattactgctgccaccttgatcaacattttcaatggtactaccaacttcggcactatgattggtgcttatttgtgtgatacttacttcggtagatacaagactttgggtttcgctactttcacatcttttttgggcttgcaagttattcaattgaccgctgctattccatcattgcatccacatagatgtggttctgaaaactctacttgtaaaggtccaactgctggtcaaatggcttttttgttaggtggtttcggcttgatgattattggtgctggtggtgttagaccatgtaatttggcttttggtgctgatcaattcaacccaaaaactgaatctggtaagaggggtatcaactctttctttaactggtacttcttcaccttcactttcgcccaaatggtttctgttactttgatcgtttacgtccagtctaatgtttcttgggctattggtttggctattccagctttgttgatgttgatttcttgcgccttgtttttcatgggctctaagatctatgttaaggttaaggctactggttctccaatgacttctgttgctcaagttatcgttgtctccatcaagaagagaagattgaacaaaccagaacagccatggttgtctttgttcaactatattccaccaacctccatcaactctaagttgccatatacagaccagttcagattctttgataaggctgctatagttaccccagaagatcaaatcaatccagatggttctgctgctaatccttggagattgtgttcaatgcaacaagttgaagaggtcaagtgcatcttgagagttttgccaatttgggttgctggtgttgtttaccatttgattgtcgttcaacaaaacacctacgctgttttccaagctcaacaaactgatagaaggttggccaattccaactttaagattccagctgcttcttacgtggtgtttttgatgttgggtatgactttgtggatcccagtttacgatagaatcatggttccattcttgcagaggttgactagaaaagaaggtggtattactgtcttgcaaagaatgggtattggtatcggtatttccgttatcaccatgttggtttctgctttcgttgaagaaagaagaagaaccattgctttgactaagccaactgttggttttcaacctagaagaggtgctatctcttctatgtctggtatgttcttgattccacaattggctttggctggtttagctgaagcttttacagctattggtcaagtcgaattctactacaagcaattcccagaaaacatgagatccattgccggttctatctttttttgtggtttggccggttcttcctacttgtcctctttgttaattgccatcgttcataagactactgaaggtgctgctactggtaattggttgccagaggatttgaacaagggtagattggattacttttactacattatcgccggtttcgaggttttgaatttctgctattttttggcttgtgccaggtggtacaagtacaaagatacaggttctgataccactgaagctaacggtgaaaaaaagcaatctgatacaaccgttgcctaa

SEQ ID NO: 417 - protein, 621 aa, Coleus forskohlii
MKAAEKETVEKKENGTLELEKIYENRTMELENVKKTVGNDHDEPKINYRGWKAMPFIIGNETFEKLGAVGTLANLLIYLTSVFNMKNITAATIINIFNGTANFGTMIGAYLCDTYFGRYNTLGFATVASFLGLQAIQLTAAIPTLHPPHCAAESSTCKGPTAGQMAFLLSGFGLMIIGAGGVRPCNLAFGADQFNPNTESGKRGINSFFNWYFCTFTFAQMVSLTLIVYVQSNVSWAIGLAIPALLMLVACVVFFMGTKIYVRVPATGSPMTSVAQVIVVAVKKRQLKQPDQPLLSLFNYIPPGSINCKLRHTDQFRFLDKAAMLTPEDHINPDGSAANRWRLCSVQQVEEVKCVLRVIPTWFAAVIFHLMINQQHTYAVFQAQQSNRRLGNTSFKIPAASYVVFMMLSMTIWIPIYDRIFVPFLRRLTGKEGGITLLQRMGIGIGISIIAMLVSGVVEEHRRTTALTKPTVGFQPRRGAVSSMSGMFLIPQFALAGLADAFTSIGLVEFYYKQFPENMRSIGGSLFFCALAGSSYLSSLLITIVHQTTQGAATGNWLPEDLNKGRLDYYYYMIAGLEVLNLGYFLVYARWYEYKETGTGSATTIEFEANGEAKQSDKTLV

SEQ ID NO: 418 - DNA, 1866 bp, Coleus forskohlii
  source 1..1866: mol_type = other DNA
atgaaggccgctgaaaaagaaaccgtcgaaaagaaagaaaacggcaccttggaattggaaaagatctacgaaaaccgtaccatggaactagagaacgttaagaaaactgttggtaacgatcacgacgaacctaagattaactatagaggttggaaagccatgccattcattatcggtaacgaaactttcgaaaagttgggtgctgttggtactttggctaatttgttgatctacctgacctccgttttcaacatgaagaatattactgctgccaccatcatcaacatctttaatggtactgctaacttcggcactatgattggtgcttatttgtgtgatacttacttcggtagatacaacactttgggttttgctactgttgcatcttttttgggtctgcaagctattcaattgactgctgctattccaactttacatccaccacattgtgctgctgaatcttctacttgtaaaggtccaactgctggtcaaatggcttttttgttgtctggtttcggcttgatgattattggtgctggtggtgttagaccatgtaatttggcttttggtgctgatcaattcaacccaaatactgaatctggtaagaggggtatcaactcttttttcaactggtacttctgtaccttcaccttcgctcaaatggtttctttgactttgatcgtctacgtccagtctaatgtttcttgggctattggtttggctattcctgctttgttgatgttggttgcttgtgtcgtttttttcatgggcaccaaaatctacgttagagttccagctactggttctccaatgacttctgttgctcaagttatagttgttgccgtcaagaagagacaattgaagcaaccagatcaacccttgttgtctttgttcaattacattccaccaggctccattaactgcaagttgagacatacagaccagttcagatttttggataaggctgctatgttgaccccagaagatcatattaacccagatggttctgctgctaatagatggcgtttgtgttctgttcaacaagttgaagaggttaagtgcgttttgagagttattccaacatggtttgctgccgttatcttccacttgatgatcaatcaacaacatacctacgctgtgttccaagctcaacaatctaatagaagattgggcaacacctcctttaagattccagctgcttcttacgttgtgttcatgatgttgtctatgaccatttggatcccaatctacgatagaatcttcgtcccattcttgagaagattgactggtaaagaaggtggtatcaccttgttgcaaagaatgggtattggtatcggcatttccattattgccatgttggtttctggtgttgttgaagaacatagaagaactactgctttgactaagccaacagttggttttcaacctagaagaggtgctgtttcttcaatgtctggcatgtttttgattccacaatttgctttggctggtttggcagatgcttttacttcaataggtttggtcgagttctactacaagcaattcccagaaaacatgagatccattggtggttctttgttcttttgtgctttagccggttcttcctacttgtcctctttattgattaccatcgttcaccaaactactcaaggtgctgctactggtaattggttgccagaagatttgaacaagggtagattggattactactactacatgattgccggtttggaagttttgaatttgggttactttttggtctacgctagatggtacgagtacaaagaaactggtacaggttctgctactaccattgaatttgaagctaatggtgaagccaagcaatctgataagactttggtttaa

SEQ ID NO: 419 - protein, 592 aa, Xanthorhiza simplicissima
MEKNSEKVLDVEEEVEKPKVNHRGVKVMPFIIGNETFEKLGTIGTSSNLVVYLTTVFNMKSVRATTLINIFNGTTNFAPLLGAFLSDAYFGRYKTLGFASISSFTGMLVLTLTAAFSKLHPPHCGTNDTGNCIEPTPWQLAFLLTGFGFLVVGAGGIRPCNLAFGADQFNPETESGKRGINSFFNWYYFTFTFAMMVSVTLIVYVQSDINWAIGLAIPTMLMFLSCALYFMGSRMYVKVKPEGSPLKGVIQVFVAAYKKRRLKSSESPQQSLFNFLPANSINSKLAYTDQFRFLDKAAILTPEDAINPDGSAVDPWRLCRMQQVEEVKCITRVLPIWASGIIYYAAIVQQHTYATFQALQSDRRLGEGSFKVPAASYIVFAMLALTIWIPFYDRIIVPSLRRITGKDGGITLLQRIGIGFVLAIISMLVSALVEVRRRNYALTRPTLGIANSGGAISSMPALWLTIQLSLAGLSEAFGAIGQVEFYYKQFPENMRSIAGSFFFCSMAGANYLSGFLVTIVHRTTAHSPSGNWLPEDLNKGKLEYFYYMFAVLGILNFGYFLVCARWYRYKGTGGVVTIEMAKESKQNGKHIV

SEQ ID NO: 420 - DNA, 1779 bp, Xanthorhiza simplicissima
  source 1..1779: mol_type = other DNA
atggaaaagaactccgagaaggttttggacgttgaagaagaagttgaaaagccaaaggttaaccacagaggtgttaaggttatgccattcattattggcaacgaaaccttcgaaaagttgggtactattggcacttcttccaacttggttgtttacttgactaccgtgttcaacatgaagtctgttagagctactaccctgatcaacattttcaatggtactaccaatttcgccccattattgggtgcttttttgtctgatgcttacttcggtagatacaagactttgggtttcgcctctatttcttctttcactggtatgttggttttgactttgactgctgctttctctaaattgcatccaccacattgtggtactaatgataccggtaactgtattgaacctactccatggcaattggctttcttgttgactggttttggttttttggttgttggtgctggtggtattagaccatgtaatttggcatttggtgccgatcaattcaacccagaaactgaatctggtaagagaggtatcaactccttttttaactggtactacttcactttcaccttcgccatgatggtttctgttactttgatcgtttacgtccagtccgatattaactgggctattggtttggctattccaaccatgttgatgtttttgtcttgtgccttgtacttcatgggttccagaatgtatgttaaggtcaaaccagaaggttctccattgaagggtgttatccaagtttttgttgctgcctacaagaagagaaggttgaagtcatctgaatccccacaacaatctctgtttaatttcttgccagccaactccatcaattccaaattggcttatactgaccagttcaggtttttggataaggctgctattttgactccagaggatgctattaacccagatggttctgctgttgatccttggagattgtgtagaatgcaacaagttgaagaggttaagtgcatcactagagttttaccaatttgggcctctggtattatctattacgctgctatagttcaacaacatacctacgctacttttcaagccttgcaatccgatagaagattaggtgaaggttcttttaaagttccagctgcctcttacatcgtttttgctatgttggctctgaccatttggattccattctacgatagaatcatcgtcccatccttgagaagaattactggtaaagatggtggtatcaccttgttgcaaagaattggtattggtttcgttctggccatcatctccatgttagtttctgctttggttgaagtgcgtagaagaaattacgctttgactagaccaactttgggtattgctaattctggtggtgctatttcatctatgccagctttgtggttgaccatccaattgtctttggctggtttatctgaagcttttggtgcaattggtcaagtcgaattctactacaaacagttcccagaaaacatgagatccattgccggttcttttttcttctgttctatggctggtgctaactacttgtctggtttcttggttactatcgttcatagaactactgcccattctccatctggtaattggttgccagaagatttgaacaagggtaagctggaatacttttactacatgttcgctgtcttgggcattttgaatttcggttactttttggtttgcgccagatggtatagatacaaaggtactggtggtgttgttaccatcgaaatggctaaagaatctaagcaaaacggtaagcacatcgtctga

SEQ ID NO: 421 - protein, 600 aa, Tabernaemontana elegans
MEKNMEKNEKETMESRAKEATVVDNEEPKINYRGIKAMPYIIGNETFEKLGAIGTLSNLLIYLTMVFNMKRITAATLLNVFNGTTNFCTLIGAFLCDTYFGRYKTLGFASITSFLGLSVITLTAAIKKLHPPHCGAEESHCTGPTSGQMAFLLSGFALMIVGAGGIRPCNLAFGADQFNPCTESGKSGINSFFNWYFFTVTFAQMVAVTLVVYVQTNISWAIGLAIPATFMLISCFIFFIGKKIYVIVEPEGSPLASIAQVMVVAVKKRRLKLPEQPWFSLFKYTPSKSINSKLPYTEQFRFLDKAAIITPEDEINADGTAANPWRLCSMQQVEEAKCVFRVIPIWAAAIVFHIGIIQQQQYVVFQAQQSNRHLGSSNFQIPAATYTIFSMISLTLFVPVYDRVLVPFMRRLTGKEGGITMLQRLGMGMFLIVPASLISAFVEERRRNLALTKPMPGVHSPRGAVSSMSALWMVPQLTITGLSEAFAAIGQIEFYYKQFPENMRSFAGSLLFLGMASSSYLNSFLLSIVHHTTEGSPSGNWLPENLNKGRLDYFYFLVTALVSLNVCYFIVCAKWYRYKGDGVATHAVEMETKKPEKAIV

SEQ ID NO: 422 - DNA, 1803 bp, Tabernaemontana elegans
  source 1..1803: mol_type = other DNA
atggaaaagaacatggaaaaaaacgagaaagaaaccatggaatccagagctaaagaagctactgttgttgataacgaagaacccaagattaactacagaggtattaaggccatgccttacattattggtaacgaaacctttgaaaagttgggtgccattggtactttgtccaatttgttgatctacctgaccatggtgttcaacatgaagagaattactgctgctaccctgttgaatgttttcaatggtactaccaacttctgcaccttgattggtgcttttttgtgtgatacttacttcggtagatacaagactttgggtttcgcttctattacctctttcttgggtttgtccgttattactttgaccgctgctattaagaaattgcatccacctcattgtggtgctgaagaatctcattgcactggtccaacatctggtcaaatggcatttttgttgtctggttttgccttgatgatagttggtgctggtggtattagaccatgtaatttggcttttggtgccgatcaattcaacccatgtactgaatctggtaagtccggtatcaattctttcttcaactggtacttcttcaccgttactttcgctcaaatggttgctgttactttggttgtttacgttcagaccaatatttcctgggctattggtttggctattccagctacttttatgctgatttcctgcttcattttcttcatcggcaagaagatctacgttatcgttgaaccagaaggttctccattggcttctattgctcaagttatggttgttgccgttaagaagagaagattgaagttgccagaacagccttggttttctttgtttaagtacaccccatccaagtccatcaattctaaattgccatacaccgaacagttcaggtttttggataaggctgcaattattacccctgaggacgaaatcaatgctgatggtacagctgctaatccttggagattgtgttctatgcaacaagttgaagaggctaagtgcgttttcagagttattccaatttgggctgctgctatcgttttccatattggtattatccaacagcagcaatacgtggtttttcaagctcaacaatccaacagacatttgggctcctctaattttcaaattccagctgctacttacaccatcttctccatgatttcattgaccttgttcgttccagtttacgatagagttttggtcccattcatgagaaggttgactggtaaagaaggtggtatcactatgttgcaaagactaggtatgggtatgttcttgatagttccagcctctttgatttccgcttttgttgaagagagaagaagaaacttggctttgactaagccaatgccaggtgttcattctccaagaggtgctgtttcttctatgtctgctttgtggatggttccacaattgactattactggtttgtctgaagcttttgccgccattggtcaaattgaattctactacaaacagttcccagagaacatgagatcttttgctggttccttgttgttcttaggtatggcttcttcctcttacctgaactcattcttgttgtcaatcgttcatcataccactgaaggttcaccatctggtaattggttaccagaaaatttgaacaagggccgtttggactacttctactttttggttactgccttggtgtctttgaacgtttgttactttatcgtttgcgctaagtggtacagatacaaaggtgatggtgttgctactcatgctgttgaaatggaaactaagaaaccagaaaaggccatcgtctga

SEQ ID NO: 423 - protein, 600 aa, Stylophorum diphyllum
MEIEKEKQKAEDMGADYDEPNKKIINYRGVKVMPFIIGNETFEKLGTIGTSTNLMVYLTTVFNMKSVSAATLMNVFNGTTNLAPLFGAFLSDTYFGRYNTLGFASISSFLGMFVLTLTAAISKLHPPHCGTTDTALCIGPTVWQLTFLLAGFAFLIVGAGGIRPCNLAFGADQFNPKTESGKKGINSFFNWYYFTFTFAMMVSLTLIVYVQSSINWALGLAIPMFLMFLSCALFFMGTRMYVIVKPEGSPLTSVAQVMVAATKKRQLKLPDNNPELSLFNYLPAKSINSRLPFTDQFRFLDKAAIVTNDDKINQDGSAANPWRLCKMQQIEEVKCLMRVIPIWASGIIYYVAIVQQHTFAVFQALQSDRRLGESSFQVPAASYIVFSMLSLTIWIPIYDQVIVPSLRKLTGKEGGITLLQRMGIGLVISIITMLVSALVEERRRGFALTKPTLGTARGGGAISSMSGLWLIAQLTIAGLSEAFNSIGQIEFYYKQFPENMRSIAGSFLFCSMAGANYLSGFMVSIVHRTTEGSSTGNWLDEDLNKGKLDYFYYMIAGLGVLNLGYFLVCARWYRYKGTIDGDTIEMAMETEQTEKHVVCV

SEQ ID NO: 424 - DNA, 1803 bp, Stylophorum diphyllum
  source 1..1803: mol_type = other DNA
atggaaatcgagaaagagaagcaaaaggccgaagatatgggtgctgattatgatgaacctaacaagaagatcatcaactacagaggtgttaaggtcatgccattcattattggtaacgaaaccttcgagaagttgggtactattggtacttctaccaacttgatggtttacttgactaccgtgttcaacatgaagtctgtttctgctgctactctgatgaatgttttcaatggcactactaatttggcccctttgtttggtgctttcttgtctgatacttacttcggtagatacaacactttgggtttcgcctctatttcttctttcttgggtatgttcgttttgactttgaccgctgctatttctaaattgcatccaccacattgtggtactactgatactgctttgtgtattggtccaactgtttggcaattgacttttttgttggctggtttcgctttcttgatagttggtgctggtggtattagaccatgtaatttggcttttggtgccgatcaattcaacccaaaaactgaatctggtaagaagggcatcaactcatttttcaactggtattacttcacgttcaccttcgctatgatggtttctttgacattgatcgtctacgtccagtcatctattaactgggctttaggtttggctatcccaatgtttttgatgttcttgtcttgcgccttgttcttcatgggtactagaatgtatgttatcgtcaagccagaaggttctccattgacatctgttgctcaagttatggttgctgctaccaaaaagagacaattgaagttgccagataacaacccagagttgtctttgtttaattacttgccagccaagtccatcaactctagattgccttttacagaccagttcagattcttggataaggctgctatcgttacaaacgacgataagatcaatcaagatggttcagctgctaatccttggagattgtgtaagatgcaacaaatcgaagaggtcaagtgcttgatgagagttattccaatttgggcctctggtatcatctactatgttgctatagttcaacaacacaccttcgcagttttccaagctttacaatctgatagaaggttgggtgaatcctcatttcaagttccagctgcttcttacatcgtgttctctatgttgtcattgaccatttggatcccaatctacgatcaagttatcgtcccatctttgagaaagttgactggtaaagaaggtggtatcaccttgttgcaaagaatgggtattggtttggtcatctccattatcaccatgttggtttctgctttggttgaagagagaagaagaggttttgctttaactaagccaactttgggtactgctagaggtggtggtgctatttcatctatgtctggtttgtggttgattgcccaattgactattgctggtttgtctgaagctttcaactccattggtcaaatcgagttctactacaagcaattcccagaaaacatgagatctattgccggttcctttttgttctgttctatggctggtgctaactacttgtcaggttttatggtttccatcgttcatagaactaccgaaggttcttctactggtaattggttggatgaggatttgaacaagggtaagctggattacttttactacatgattgcaggtttgggcgttttgaatttgggttactttttggtttgtgccagatggtacagatacaagggtacaattgatggtgacaccattgaaatggctatggaaactgaacaaaccgaaaagcacgttgtttgcgtttga

SEQ ID NO: 425 - protein, 584 aa, Rauwolfia serpentina
MENQEHKITKNEPNYRGIKAMPFVIGNETFEKLGTIGTSSNLLVYLTSVFHMKTITATNLMNVFNGTCNFGTLVGAFLCDTYFGRYNTLGFASISSFLGMLILTLTAAVRDLHPPACGKEEGSRCVGQTGWQMAFLLSGFAFLIVGASGIRPCNLAFGADQFNPNTDSGRKGINSFFNWYYFTYTFAMMVSLTVIVYVQSNISWSIGLAIPTFLMFLSCATFFVGTRIYVRVLPEGSPLTSIAQVVVSAIKKRKLKIPDQPKLSLFNHSTSTINSRISYTDQFRFLNKGAIITSEDQFNSDGSAMDPWRLCSVQQVEEVKCFLRVIPIWIASIMYFVSVVQQQNYVVFQALQADRRFGTSKFKIPAASYIVIAMLALTIWIPIFDRILVPWLQRLTGKEGGLTILQRMGIGMGLSVFTMLASALVENKRRTMALTRPTLGFEPRKGAISSMSGLWLIPQLTLSGLSEAFTVIGQNEFFYKQCPENMRSIAMALVFCGFAGSSYLSSLLASIVQKITGGGGREDWLAEDLNKGRLDYFYYLIGALEMLNLLYFLLCSKWYQYKETEKVPEVAMAKLHNSEEKSIV

SEQ ID NO: 426 - DNA, 1755 bp, Rauwolfia serpentina
  source 1..1755: mol_type = other DNA
atggaaaatcaagagcacaagatcaccaagaacgaacctaattacagaggtattaaggccatgccattcgtcattggtaacgaaacttttgagaagttgggtactatcggcacttcttctaatttgttggtttacctgacctccgttttccatatgaagactattactgctaccaacctgatgaacgttttcaacggtacttgtaacttcggtactttggttggtgctttcttgtgtgatacttacttcggtagatacaacactttgggtttcgcctctatttcttctttcttgggtatgttgattttgaccttgactgctgctgttagagacttgcatccaccagcttgtggtaaagaagaaggttctcgttgcgttggtcaaactggttggcaaatggcttttttgttgtctggtttcgctttcttgattgtcggtgcttctggtattagaccatgtaatttggcttttggtgccgatcaattcaacccaaatactgattctggtaggaagggtatcaactctttctttaactggtactacttcacctacaccttcgctatgatggtttctttgactgttatcgtctacgtccagtctaacatttcttggtctattggtttggctatcccaacctttttgatgttcttgtcttgtgctactttcttcgtcggtactagaatctacgttagagttttgccagaaggttcaccattgacttctattgctcaagttgttgtttccgccatcaagaagagaaagttgaaaattccagatcagcccaagctgtctttgttcaatcattctacttccaccatcaactccagaatctcttacacagaccaattcaggtttttgaacaagggtgccattatcacatccgaagatcagtttaattctgacggttctgctatggatccttggagattgtgttctgttcaacaagttgaagaggtcaagtgcttcttgagagttattccaatttggatcgcctccatcatgtacttcgtttctgttgtccaacaacaaaactacgttgttttccaagccttgcaagctgatagaagatttggtacttccaagttcaagattccagctgcttcttacatcgttattgctatgttggctttgaccatttggatcccaatcttcgatagaattttggtcccatggttgcaaagattgactggaaaagaaggtggtttgaccatcttgcaaagaatgggtattggtatgggtttgtccgtctttactatgttagcttctgctttggtcgaaaacaagagaagaactatggctttaactagaccaaccttgggttttgaacctagaaaaggtgctatctcttctatgtcaggtttgtggttgattccacaattgaccttatctggtttgtctgaagctttcaccgttatcggtcaaaacgaattcttctacaaacagtgcccagaaaacatgagatcaattgctatggccttggttttctgtggttttgctggttcttcttacctgtcatctttgttggcttctatcgttcaaaagattacaggtggtggtggtagagaagattggttggctgaagatctaaacaagggtagattggactacttctactacttgattggtgccttggaaatgctgaacttgttgtacttcttgttgtgctctaagtggtatcagtacaaagagactgaaaaggttcctgaagttgccatggctaagttgcataattctgaagaaaagtccatcgtctaa

SEQ ID NO: 427 - protein, 604 aa, pelargonium x hortorum
MEKNGQEMLKIKKPMERDEQDDDDEPKINYRGWKVMPFIIGNETFEKLGAIGTLANLLIYLTTVFNMNSITATTIINVFNGTTNLATLVGAYVCDTYFGRYKTLGFSTITSFLGLLVIQLTAAITKLHPPSCAKKSSSCTGPTVGQMAFLLTGFGLLIVGAAGIRPCNLAFGADQFNPNTESGKRGVNSFFNWYFFTFTFAQMVSLTLIVYVQSNVSWALGLGIPAILMLISCALFFMGSKMYVKVQAMGSPMTSVVRVIAATIKKRRLKQQDHPWLSLFNYVHPKSINSKLPYTDQFRFFDKAAIKTAEDKLNPDGSAADPWKLCSMQQVEEVKCLIRVMPIWASAIIYYVVIVHQHTYVVFQALQSDRRIGNYTGFLIPAASYYVFLMLSFSACIPIYDRFLVPFLRRITRKEEGITLLQRIGIGIVFSIAAMLVSGLVEERRRSIALTRPTLGNVPRKGAISSMSGLWLVPQLALAGLSETFASIGHVEFYYKQFPENMRSIAGSLFYCAMAVASYFSSFLISIVHRTTATTGGEGGNWLPEDLNKGRLDWYYYLIAGMGVVNLCYFLVCAEWYKYKGNAAIINSIEIGMEAKQSDKKILA

SEQ ID NO: 428 - DNA, 1815 bp, pelargonium x hortorum
  source 1..1815: mol_type = other DNA
atggaaaagaacggccaagagatgctgaagattaagaaacctatggaaagggatgaacaagatgatgatgacgaacctaagatcaattacagaggttggaaagtcatgccattcatcattggtaacgaaacctttgaaaagttgggtgccattggtactttggctaatttgttgatctacctgactaccgtgttcaacatgaactctattactgctaccaccatcatcaacgttttcaatggtactactaatttggccactttggttggtgcttacgtttgtgatacttacttcggtagatacaagaccttgggtttctctactattacctctttcttgggtttgttggtcattcaattgactgctgctattaccaaattgcatccaccatcttgtgccaagaaatcttcttcttgtactggtccaactgttggtcaaatggcttttttgttgactggttttggcttgttgatagttggtgctgctggtattagaccatgtaatttggcttttggtgccgatcaattcaacccaaatactgaatctggtaagagaggtgtcaactctttctttaactggtacttcttcactttcaccttcgctcaaatggtttctttgaccttgatcgtttacgtccagtctaatgtttcttgggctttaggtttgggtattccagctattttgatgttgatttcctgcgccttgtttttcatgggttctaagatgtacgttaaggttcaagctatgggttctccaatgacttctgttgttagagttattgctgccacgatcaagaagagaagattgaagcaacaagatcacccatggttgtctttgttcaattacgttcatcccaagtccatcaactctaagttgccatatacagaccagttcagattctttgataaggctgctatcaaaaccgccgaagataagttgaatccagatggttctgctgctgatccatggaaattgtgttctatgcaacaagttgaagaggtcaagtgcttgataagagttatgccaatttgggcttccgccattatctattacgttgttatcgttcatcaacacacctacgttgttttccaagccttgcaatctgatagaagaattggtaactacaccggtttcttgattccagctgcttcttactacgttttcctgatgttgtctttctctgcttgcattccaatctacgatagatttttggtcccattcttgagaaggatcaccagaaaagaagaaggtatcaccttgttgcaaaggattggtattggtatcgttttctccattgctgctatgttggtttctggtttggttgaagaaagacgtagatctattgctttgactagaccaactttgggtaacgttccaagaaaaggtgctatctcttctatgtcaggtttgtggttggttccacaattggctttggctggtttgtctgaaacttttgcttctattggtcacgtcgagttctactacaaacaattcccagaaaacatgagatccattgccggttctttgttttattgtgctatggctgttgcctcctacttctcttcatttttgatttccatcgttcatagaactaccgctactactggtggtgaaggtggtaattggttgccagaagatttgaacaagggtagattagattggtactattacttgattgccggtatgggtgttgttaacttgtgttactttttggtttgcgccgaatggtacaagtacaaaggtaatgctgccatcattaactccatcgaaattggtatggaagccaagcaatccgataagaagatcttggcttaa

SEQ ID NO: 429 - protein, 598 aa, Chelidonium majus
MEMEKEKQKSEDMGADYDEPNKKIINYRGVKVMPFIIGNETFEKLGTIGTSTNLMVYLTTVFNMKSVSAATLMNMFNGTTNLAPLFGAFLSDAYFGRYITLGFASISSFLGMFVLTLTAAISKLHPPHCGTKDTAMCIGPTVGQLTFLLTGFAFLIVGAGGIRPCNLAFGADQFNPKTESGKKGINSFFNWYYFTFTFAMMVSLTLIVYVQSNINWALGLAIPMFLMFLSGALFFMGTRMYVIVKPEGSPLKSVAQVMVAATKKRRLKLPENNPELSLFNYLPANSINSRLPFTDQFRFLDKAAIVTNDDKINQDGSAANPWRLCRMQQIEEVKCLMRVIPIWASGIIFYVTIVQQHTFAVFQALQSDRRLGESSFQVPAASYIVFQMLSLTIWIPIYDQVIVPSLRKLTGKEGGITLLQRMGIGIVLSIITMLVSALVEEKRRGFAFTKPTLGTARGGGAISSMSGLWLIAQLTIAGLSEAFNLIGQIEFYYKQFPENMRSIAGSFLFCGMAGANYLSGFMVSIVHRTTEGSSMGNWLDEDLNKGKLDYFYYVIAGLGVLNFGYFLVCARWYRYKGTIDGDTIEMAMETEQTEKHVV

SEQ ID NO: 430 - DNA, 1797 bp, Chelidonium majus
  source 1..1797: mol_type = other DNA
atggaaatggaaaaagagaagcaaaagtccgaagatatgggtgctgattatgatgaacctaacaagaagatcatcaactacagaggtgttaaggtcatgccattcattattggtaacgaaaccttcgagaagttgggtactattggtacttctaccaacttgatggtttacttgactaccgtgttcaacatgaagtctgtttctgctgctactctgatgaatatgttcaatggcactactaatttggcccctttgtttggtgcttttttgtctgatgcttatttcggtaggtacatcactttgggtttcgcctctatttcttctttcttgggtatgttcgttttgactttgaccgctgctatttctaaattgcatccaccacattgtggtactaaggatactgctatgtgtattggtccaactgttggtcagttgacttttttgttgactggtttcgctttcttgatagttggtgctggtggtattagaccatgtaatttggcttttggtgccgatcaattcaacccaaaaactgaatctggtaagaagggcatcaactcatttttcaactggtactacttcactttcaccttcgctatgatggtttctttgaccttgatcgtttacgtccagtctaatatcaattgggctttaggtttggccattccaatgttcttgatgtttttatccggtgccttgttcttcatgggcactagaatgtatgttatcgttaagccagaaggctctccattgaaatctgttgctcaagttatggttgctgctacgaagaaaagaagattgaagttgccagaaaacaaccccgaattgtctttgtttaattacttgccagccaactccatcaactctagattgccttttacagaccagttcagattcttggataaggctgctatcgttacaaacgacgataagatcaatcaagatggttcagctgctaatccttggagattgtgtagaatgcaacaaatcgaagaggtcaagtgcttgatgagagttattccaatttgggcctctggtatcattttctacgttaccatagttcaacaacacacctttgctgtttttcaagccttgcaatctgatagaagattgggtgaatctagctttcaagttccagctgcttcttacatcgttttccaaatgttgtctttgaccatctggatcccaatctacgatcaagttatagtcccatccttgagaaagttgacaggtaaagaaggtggtatcaccttgttgcaaagaatgggtattggtatcgtcttgtccattatcaccatgttggtttctgctttggttgaagaaaaaagaagaggttttgctttcaccaagccaactttgggtactgctagaggtggtggtgctatttcatctatgtctggtttgtggttgattgcccaactaactattgctggtttatccgaagctttcaacttgattggtcagatcgaattctactacaagcaattccctgaaaacatgagatctattgccggttcctttttgttttgtggtatggctggtgctaactacttgtcaggttttatggtttccatcgttcatagaactaccgagggttcttctatgggtaattggttggatgaagatttgaacaagggcaagttggactacttctactatgttattgcaggtttgggtgttttgaacttcggttactttttagtttgcgctagatggtacagatacaagggtacaattgatggtgacactattgaaatggctatggaaactgaacaaaccgaaaagcacgttgtctga

SEQ ID NO: 431 - protein, 600 aa, Corydalis chelanthifolia
MKKMEEKFTDDENMSTGAAANDDDDDDQPKHRGIKVMPYIIGNETFEKLGTIGTSSNLTVYLTTVFNMKSVSAATLVNVFNGTTNFAPLLGAFLSDTYFGRYKTLGFASISSFIGMFVLMLTAAISKLHPPHCGTTEAGMCTGPTNGQLTFLLIGFGFLVVGAGGIRPCNLAFGADQFNPNTESGKRGINSFFNWYYFTFTFAMMVSVTLIVYVQSNISWAIGLGIPTFLMFLSCAFFFVGTHLYVIVKPEGSPLTGIAQVIVAAIKKRKLRHPENPRLSLFNYHPAKSINSKLPYTHQFRFLDKAAIVTLEDPINPDGSAANPWRLSRMQQVEEVKCLFRVIPIWAAGIIYYVAIVQQNTYAVFTALQSDRYLGKTSFQVPAASYIVFSMLGLTIWIPIYDRIIVPQLRKLTGKDGGITLLQRIGIGLVLAIITMIVAALVEERRRHLALTEPTRGTANGGGSISSMSGLWLIPQLLIGGLSEAFASVGQVEFYYKQFPENMRSIAGSFFFLGMAAANYLSGFMVSIIHRTTNNASEGNWLPEDLNKGRLDYFYYLIAALGVLNFMYFIVCSMWYRYKGTCDDTVEIAMETKESEKQVV

SEQ ID NO: 432 - DNA, 1803 bp, Corydalis chelanthifolia
  source 1..1803: mol_type = other DNA
atgaagaagatggaagagaagttcaccgacgatgagaatatgtctactggtgctgctgctaatgatgatgacgatgatgatcaacctaaacacagaggtattaaggtcatgccttacatcattggtaacgaaacctttgagaagttgggtactattggcacttcttctaacttgactgtttacttgactaccgtgttcaacatgaagtctgtttctgctgctactttggtcaatgttttcaatggtactaccaacttcgctccattattgggtgcttttttgtctgatacttacttcggtagatacaagactttgggtttcgcctctatttcctctttcattggtatgttcgttttgatgttgaccgctgccatttctaaattgcatccaccacattgtggtactactgaagctggtatgtgtactggtccaactaatggtcaactgacctttttgttgattggtttcggtttcttggttgttggtgctggtggtattagaccatgtaatttggcttttggtgccgatcaattcaacccaaatactgaatcaggtaagaggggtatcaactctttctttaactggtattacttcacgttcaccttcgccatgatggtttctgttactttgatcgtttacgtccagtccaatatttcttgggctattggtttgggtattcccactttcttgatgttcttgtcttgtgcctttttcttcgttggtactcacttgtacgttatcgttaagccagaaggttctccattgactggtattgctcaagttatagttgctgccatcaagaagagaaagttgagacatccagaaaacccaaggttgtctttgtttaattaccatccagccaagtccatcaactctaagttgccatatactcaccagttcagattcttggataaggctgctatagttaccttggaagatccaatcaatccagatggttcagctgctaatccttggagattgtctagaatgcaacaagttgaagaggtcaagtgcttgttcagagttattccaatttgggctgcaggtatcatctattacgttgctatcgttcaacaaaacacctacgctgtttttactgccttgcaatctgatagatacttgggtaagacatcctttcaagttccagctgcttcttacatcgttttctctatgttgggtttgaccatttggatcccaatctacgatagaatcatcgtcccacagttgagaaaattgacaggtaaagatggtggtatcaccttgttgcaaagaattggtataggtttggttttggccatcatcactatgatcgttgctgctttggttgaagaaagaagaaggcatttggcattgactgaacctactagaggtactgctaatggtggtggttctatttcttctatgtctggtttgtggttgatccctcaattattgattggtggtttgtctgaagctttcgcttctgttggtcaagttgaattctactacaagcagttcccagaaaacatgagatctattgccggtagctttttctttcttggcatggctgctgcaaattacttgtcaggttttatggtttccatcatccacagaactaccaacaatgcttctgaaggtaattggttgccagaggatttgaacaaaggtagattggactacttctactacttgattgctgcattgggtgtcttgaacttcatgtactttattgtctgctctatgtggtacaggtacaagggtacttgtgatgatactgttgaaatcgccatggaaacgaaagagtctgaaaagcaagttgtctaa

SEQ ID NO: 433 - protein, 589 aa, Tinospora_cordifolia
MEKKETKGHEKAAHIEAETPNTINYRGIRAMPFIIGNETFEKLGTIGTSTNLLVYLKSVFNMKSITATTLVTAFSGTTNLTPLLGAFLSDSYFGRYKTLGFASICSFTGMFILTLTAAITKMHPPRCIGKDINIADSCHGPTLWQMVFLLTGFGFLVVGAGGIRPCNLAFGADQFNPNTESGKRGINSFFNWYYFTFTFAMMVSVTIIVYVQSNINWAIGLAIPTFLMFLSCALYFMGSRIYVKVKPEGSPLTSVVQVLAAAMKKRHLESPEAPEFSLFNFHHPSSINSKLPYTNQFRFLDKAAIITEEDHVNEDGSVANPWRLCRLQQVEEVKCLFRIIPIWAAGIIYYVAIVQQQTYAVLQAVQSDRSIGGSKFKIPAASYIVFTMLALTIWIPIYDRIIVPSLRKFTGKEGGITMLQRIGIGIVLSIIAMLVCALVEQRRRNVALTTNGSMSALWLIPQLILAGLAEAFASIGQIEFYYKQFPENMRSIAGSLFFCTMAGANYLSGLLVSIVHKTTATASGGNWLAEDLNKGRLDHYYFMIAGLGVVNFGYFLVCAGWYRYKGTGVVSSSNIEMGIDTKKNETHVV

SEQ ID NO: 434 - DNA, 1770 bp, Tinospora_cordifolia
  source 1..1770: mol_type = other DNA
atggaaaagaaagagactaagggtcacgaaaaggctgctcatattgaagctgaaactccaaacaccattaactacagaggtattagagccatgccattcattattggtaacgaaacctttgaaaagttgggtactattggcacttctaccaacttgttggtttacctgaagtccgttttcaacatgaagtctattactgctactaccttggttactgctttctctggtactactaatttgactccattattgggcgctttcttgtccgattcttatttcggtagatacaagactttgggtttcgcctctatttgttctttcaccggtatgttcattttgactttgactgctgctatcaccaaaatgcatccaccaagatgtattggtaaggacattaacattgccgattcttgtcatggtccaactttgtggcaaatggtttttttgttgactggtttcggtttcttggttgttggtgctggtggtattagaccttgtaatttggcttttggtgccgatcaattcaacccaaatactgaatctggtaagaggggtatcaactcttttttcaactggtattacttcacgttcaccttcgctatgatggtttccgttactatcatcgtttacgtccagtctaatatcaactgggctattggtttggctattccaactttcttgatgttcttgtcttgtgccttgtacttcatgggttctagaatctacgttaaggttaagccagaaggttctccattgacatctgttgttcaagttttggctgctgccatgaagaaaagacatttggaatctccagaagctccagagttttctttgttcaatttccaccatccatcctccatcaattctaagttgccatacaccaatcagttcaggtttttggataaggctgccattattaccgaagaagatcacgttaacgaagatggttctgttgctaatccttggagattgtgtagattgcaacaagtcgaagaggttaagtgcttgttcagaattattccaatttgggctgccggtatcatctattatgttgctatagttcaacaacagacctacgctgttttacaagctgttcaatctgacagatctatcggtggttctaagtttaagattccagctgcttcttacatcgtgttcactatgttggctttgaccatttggattccaatctacgatagaatcatcgtcccatccttgagaaagttcactggtaaagaaggtggtatcaccatgttgcaaagaattggtattggtatcgtcctgtccattatcgcaatgttggtttgtgctttggttgagcaaagaagaagaaacgttgctttgactaccaacggttctatgtctgctttgtggttgattccacaattgattttggctggtttggcagaagcttttgcttccattggtcaaatcgaattctactacaagcagttcccagaaaacatgagatcaattgccggttctttgtttttctgtactatggctggtgctaactacttgtctggtttgttagtttccatcgttcataagactactgctacagcttctggtggtaattggttggctgaagatttgaacaagggtcgtttggatcattactacttcatgattgctggtctgggtgttgttaatttcggttactttttagtttgcgctggttggtacagatacaaaggtactggtgttgtctcctcctctaatattgaaatgggtattgacaccaaaaagaacgaaacccacgttgtctaa

SEQ ID NO: 435 - protein, 606 aa, Papaver bracteatum
MEKSHNQKNLKLEEMEVVVKDEPEKVNYRGIKAMPYIIGNETFEKLGTIGTSSNLTVYLTTVFNMKNVSAATLMNVFTGTTNLTPLVGAFLSDAYFGRYKTLGFASISSFMGMLVIMFTAAISKLHPHHCESKDRMLCDSPTPWQLTFLLTGFGFLIIGAGGIRPCNLAFGADQFNPKTESGKRGINSFFNWYYFTFTFAMMVSLTFIVYVQSDINWALGLAIPTFLMFLSCVFFFIGTRIYVIVKPEGSPLTSIAQVLVAATKKRHLTLPENPEFALFNFIPANTINSRLPLTGQFRFLDKAAILTDDDKIKPDGSAENPWRLCRMQQIEEVKCVIRILPIWASGIMYYVALTQMHTYAVFQALQSDRHFGSTKFEVPAASYIVFQFLSLTLWIPIYDRLLVPAIRKRTKIEGGITLLQRMGIGIVLSILTMLVSGLVEERRRSFAYSKPSLGTSPSGGGISSMSALWLILQLTLAGLSEAFNSIGQVEFYYKQFPENMRSIAGSMFFLTISMANYLSGFMVSVVHRTTNNASSGNWLAEDLNNGKLDYFYYMIAGLGVLNFGYFLVVARWYKYKDAAKSSDDDENDAIEMAKAITKQPTEKQQV

SEQ ID NO: 436 - DNA, 1821 bp, Papaver bracteatum
  source 1..1821: mol_type = other DNA
atggaaaagtcccacaaccagaagaacttgaagttggaagaaatggaagttgtcgttaaggacgaaccagaaaaggttaattacagaggtattaaggccatgccttacatcattggtaacgaaactttcgagaagttgggtactattggcacttcttctaacttgactgtttacttgactaccgtgttcaacatgaagaatgtttctgctgctaccctgatgaatgttttcactggtactactaatttgaccccattggttggtgcttttttgtctgatgcttacttcggtagatacaagactttgggtttcgcctctatttcttctttcatgggtatgttggttatcatgttcaccgctgctatttctaagttgcatccacatcattgcgaatccaaggatagaatgttgtgtgattctccaactccatggcaattgacttttttgttgactggtttcggcttcttgattattggtgctggtggtattagaccatgtaatttggcttttggtgccgatcaattcaacccaaaaactgaatctggtaagaggggtatcaactctttcttcaactggtattacttcactttcaccttcgccatgatggtttctttgactttcatcgtttacgtccagtccgatattaactgggctttaggtttggctattccaacctttttgatgttcttgtcctgcgtgtttttcttcattggtactcgtatctacgttatcgttaagccagaaggttctccattgacttctattgctcaagttttggttgctgccactaagaagagacatttgactttgccagaaaacccagaattcgctttgttcaatttcattccagccaacaccatcaactctagattgccattgactggtcaattcagattcttggataaggctgccattttgaccgatgatgataagatcaaaccagatggttctgctgaaaatccttggagattgtgtagaatgcaacaaatcgaagaggttaagtgcgtcattagaattttgccaatttgggcctctggtatcatgtattatgttgctttgactcagatgcatacctacgctgtttttcaagccttgcaatctgatagacatttcggttctactaagttcgaagttccagctgcttcttacatcgttttccaattcttgtctttgaccttgtggatcccaatctatgatagactattggttccagccatcagaaagagaactaagattgaaggtggtatcaccttgttgcaaagaatgggtattggtatcgtcttgtctatcttgaccatgttggtttcaggtttggtcgaagagagaagaagatcttttgcttactctaagccatccttgggtacttctccatctggtggtggtatatcttctatgtctgctttgtggttgatcttgcaattgacattggctggtttgtccgaagcttttaactcaattggtcaagtcgagttctactacaagcaattcccagaaaacatgagatccattgctggttccatgttctttttgactatttccatggccaactacttgtccggttttatggtttctgttgttcacagaactaccaacaatgcctcttctggtaattggttggctgaagatttgaacaacggtaagctggattacttttactacatgattgcaggtttgggcgttttgaatttcggttactttttggttgttgctaggtggtacaagtacaaggatgctgctaaatcttctgatgatgacgaaaacgacgctattgaaatggctaaggctattactaagcaacccactgaaaagcaacaagtctga

SEQ ID NO: 437 - protein, 600 aa, Papaver bracteatum
MGAETTMEEKSTVVTATAKETQVNYKGIKTMPFIIGNEAFEKLGAWGTTSNLIVYFTTVFNMKRVNAAILIDAYKGTSFVTPLIGGFLADAYFGRYKTLGFASIASFLGMILLMLTAAISKLHPPNCGTQKNELCVQATTAQWSFMACALGFLVIGAGGIRPCNMAFGADQFNPKTDTGKRSIISFINWYFFVLSSCTLISLTVIIYVQSNVSWTVGLALPPCLMLIACILYFMGSRIYVKVKPEGSPFTRFIQVLVAATRKRSLAKLDNPEIALFNYTDPNSINSMLQHTDQFRFFDKAATISDIDQIKADGTSANPWRLCSMQQVEELKCLTRVLPVWISSAIFHITVTQQHSYAVYQALQSDRHLGTKNFKVPAASYIVFSWLTIVIWIPIYDRLIVPPLRKLTGQEGGITLLQKMGIGTFISIITMFVSALMEQRRRNFAITYPTLGIAKGGGAVSSMSAHWLILQLSINGLSEAFNHIGQLEFYYNQFPENMRSVAVSFFFLGFAVGSYISSFMVSIVHRTTEGNVTGNWLPEDLNKGRLDYFYYMITVMNVLNFGYFLVCARWYRYKGSGTATKEPASKNIKDAEKPQPKGTDL

SEQ ID NO: 438 - DNA, 1803 bp, Papaver bracteatum
  source 1..1803: mol_type = other DNA
atgggtgctgaaactaccatggaagaaaagtctactgttgttactgctaccgctaaagaaacccaagttaattacaagggtatcaagaccatgccattcatcattggtaatgaagccttcgaaaaattaggtgcttggggtactacttccaacttgatcgtttacttcactaccgtgtttaacatgaagagagttaacgccgccattttgattgatgcttacaaaggtacttctttcgtcaccccattgattggtggttttttggctgatgcttatttcggtagatacaagactttgggtttcgcttctattgcttctttcttgggtatgatcttgttgatgttgaccgctgctatttctaaattgcatccaccaaattgcggcacccaaaagaatgaattgtgtgttcaagctactaccgctcaatggtcttttatggcttgtgctttaggtttcttggttattggtgctggtggtattagaccatgtaatatggcttttggtgccgatcaattcaacccaaaaactgatactggtaagaggtccatcatctcattcatcaactggtatttcttcgtcttgtcctcttgcaccttgatttctttgaccgttatcatctacgtccagtctaatgtttcttggactgttggtttggctttgccaccatgtttgatgttaattgcttgcatcttgtacttcatgggctctagaatctacgttaaggttaagccagaaggttctccattcaccagattcattcaagttttggttgctgctaccagaaagagatctttggctaaattggataacccagaaatcgccttgttcaactacactgatccaaactccattaactccatgttgcagcatacagaccaattcagatttttcgataaggctgccaccatctccgatattgatcaaatcaaagctgatggcacttctgctaatccttggagattgtgttctatgcaacaagtcgaagaattgaagtgcttgactagagttttgccagtctggatttcttccgctattttccatattactgtcacccaacaacattcctacgctgtttatcaagccttgcaatctgatagacatttgggcactaagaactttaaggttccagctgcttcttacatcgttttctcttggttgactatcgttatctggatcccaatctatgacagattgatagttccaccattgagaaagttgactggtcaagaaggtggtatcactttgttgcaaaagatgggtattggcaccttcatctccattattaccatgttcgtttccgccttgatggaacaaagaagaagaaacttcgctatcacttacccaactttgggtattgctaaaggtggtggtgctgtttcttctatgtctgctcattggttgatcttgcagttgtctattaacggtttgtccgaagcctttaaccatatcggtcaattggagttttactacaatcagttcccagagaacatgagatctgttgccgtttcttttttcttcttgggttttgctgtcggctcctacatttcttctttcatggtttctatcgttcacagaactaccgaaggtaatgttactggtaattggttgccagaggatttgaacaaaggtagattggactacttctactacatgatcaccgttatgaacgttttgaacttcggttacttcttggtttgtgctagatggtacagatacaaaggttctggtactgctacaaaagaaccagcttccaagaatattaaggatgctgaaaaaccacagccaaagggtactgatttgtga

SEQ ID NO: 439 - protein, 570 aa, Papaver bracteatum
MPFIIGNEAFEKLGTWGTLSNLIVYLTTVFNMKRVNAAVLINAFTGTSFVSPLIGGFLADAYFGRYKTLGFAPVASLLGMILLMLTAAISKLHPPNCGTQKNELCVQATTAQWSFMVCALGFLVIGSGGVRPCNLAFGADQFNPKTDTCKRSIISFINWYFFVLSSCTLISLTVIVYVQSNVSWAVGLALPPCLMLIACILYFMGSRIYVKVKPEGSPFTRFIQVLVAATRKRSLAKLDNPEISFFNCIDPNSINSMLQHTDQFGFFDKAAILSDIDQIKADGTSANPWRLCSMQQVEELKCVIRVLPVWVSGAIFHITVTQQHSYVVFQALQSDRHLGTKNFKVPAASYIVFSWLTIVIWIPIYDRLIVPPLRKLTGQEGGITLLQKMGIGTFISIITMFVSALMEQRRRNFAITYPTLGIAKGGGAVSSMSAHWLILQLSINGLSEAFNHIGQLEFYYNQFPENMRSVAVSFFFLGFAVGSYISSFMVSIVHRTTEGNVTGNWLPEDLNKGRLDYFYYMITVMNVLNFGYFLVCARWYRYKGSGTATRELASKNIKDAEKPQPKGIDL

SEQ ID NO: 440 - DNA, 1713 bp, Papaver bracteatum
  source 1..1713: mol_type = other DNA
atgccattcatcattggtaacgaagccttcgaaaaattaggtacttggggtactttgtccaacttgatcgtttatttgaccaccgtgtttaacatgaagagagttaacgctgccgttttgattaacgcttttactggtacttctttcgtgtccccattgattggtggttttttggctgatgcttacttcggtagatacaagactttgggttttgctccagttgcttctttgttgggtatgatcttgttgatgttgaccgctgctatttctaaattgcatccaccaaattgcggcacccaaaagaatgaattgtgtgttcaagctactaccgctcaatggtcttttatggtttgtgcattgggtttcttggttattggttctggtggtgttagaccatgtaatttggcttttggtgctgatcaattcaacccaaagactgatacttgcaagaggtccatcatttccttcatcaactggtatttcttcgtcttgtcctcttgcaccttgatttctttgactgttatcgtctacgtccagtctaatgtttcttgggctgttggtttggctttgccaccatgtttgatgttaattgcttgcatcttgtacttcatgggctctagaatctacgttaaggttaagccagaaggttctccattcaccagattcattcaagttttggttgctgctaccagaaagagatctttggctaaattggataaccccgagatctcctttttcaactgtattgatccaaactccatcaactccatgttgcagcatacagatcaatttggtttcttcgataaggccgccattttgtccgatattgatcaaatcaaagctgacggtacttctgctaatccttggagattgtgttctatgcaacaagtcgaagaattgaagtgcgttatcagagttttgccagtttgggtttcaggtgccattttccatattaccgttactcaacaacactcctacgttgttttccaagccttgcaatctgatagacatttgggtactaagaacttcaaagttccagctgcatcttacatcgttttctcttggttgactatcgttatctggatcccaatctatgacagattgatagttccaccattgagaaagttgactggtcaagaaggtggtattaccttgttgcaaaaaatgggtatcggcaccttcatctccattattactatgttcgtttccgccttgatggaacagagaagaagaaatttcgctatcacttacccaaccttgggtattgctaaaggtggtggtgctgtttcttctatgtctgctcattggttgatcttgcagttgtctattaacggtttgtccgaagctttcaaccatatcggtcaattggagttttactacaatcagttcccagagaacatgagatctgttgccgtttcttttttcttcttgggtttcgctgtcggttcctacatttcttcattcatggtttccatcgttcacagaactactgaaggtaatgttactggtaattggttgccagaggatttgaacaaaggtagattggactacttctactacatgatcaccgttatgaacgttttgaacttcggttactttttggtttgcgctagatggtacagatacaaaggttctggtactgctactagagaattggcttctaagaacattaaggatgctgaaaagccacagccaaaaggtattgatttgtga

SEQ ID NO: 441 - protein, 595 aa, Amsonia hubrichtii
MEMNMEKNEKETMEGKAIDDEEPKINYRGIRAMPYIIGNETFEKLGAIGTLSNLLVYLTSVFNMKRITAATLLNVFNGTTNFATLIGAFLCDTYFGRYKTLGFASITCSLGLLLITLTAAIKKLHPPHCGAEESHCIGPTWGQMAFLLSGFALMIVGAGGIRPCNLAFGADQFNPCTESGKRGINSFFNWYFFTITFAQMVSVTLVVYVQSDVNWGIGLAIPAIFMLISCFIFFAGTKIYVMVKPEGSPLASIAQVMVAAFKKRRLKLPEQPWFSLFNYTPPKSINSKLPYTQQFSFLDKAAIITPEDEINADGAAANTWRLCSMQQVEEAKCVFRVIPIWAAAIVYHIGLIQQQQYVVFQAEQSNRHLGNSNFQIPAATITIFSMLSLTLFVPVYDRVLVPCMRRLTGKEGGITMLQRMGTGLFLIVPASLISAFIEERRRNLALTEPMPGFHSQRGAVSSMSALWMVPQLSLAGLSEAFASIGQIEFYYKQFPENMRSFAGSLLFLGMASSSYLNSFLISIVHRTTDGSPSGNWLPEDLNKGKLDYFYFLITALVSLNVCYFIVCAKWYRYKGDGETIDAVEMETKKPERAVV

SEQ ID NO: 442 - DNA, 1788 bp, Amsonia hubrichtii
  source 1..1788: mol_type = other DNA
atggaaatgaacatggaaaagaacgagaaagaaaccatggaaggtaaggccattgatgatgaagaacctaagattaactacagaggtattagagccatgccttacattattggtaacgaaacctttgaaaagttgggtgccattggtactttgtccaatttgttggtttacctgacctccgttttcaacatgaagagaattactgctgctaccctgttgaatgttttcaatggtactactaatttcgccaccttgattggtgctttcttgtgtgatacttacttcggtagatacaagactttgggtttcgcttctattacctgttcattgggtttgttgttgattactttgaccgctgccattaagaaattgcatccacctcattgtggtgctgaagaatctcattgcattggtccaacttggggtcaaatggcttttttgttgtctggttttgccttgatgatagttggtgctggtggtattagaccttgtaatttggcttttggtgccgatcaattcaacccatgtactgaatctggtaagagaggtatcaactctttcttcaactggtacttcttcaccattaccttcgctcaaatggtttctgtcactttggttgtttacgttcaatccgatgttaactggggtattggtttggctattccagctatctttatgctgatttcctgcttcattttcttcgccggtactaagatatacgttatggttaagccagaaggttctccattggcttctattgctcaagttatggttgctgctttcaagaagagaagattgaagttgccagaacagccttggttttctttgtttaattacaccccaccaaagtccatcaactctaaattgccatacactcagcagttctcattcttggataaggctgctattattacccctgaagatgagattaacgctgatggtgctgctgctaatacttggagattgtgttctatgcaacaagttgaagaggctaagtgcgttttcagagttattccaatttgggctgctgcaatcgtttatcatatcggtttgatccaacaacagcagtacgttgtttttcaagccgaacaatctaacagacacttgggtaattccaacttccaaattccagctgctaccattaccatcttctctatgttgtctttgaccttgttcgttccagtttacgatagagttttggttccatgtatgagaaggttgactggtaaagaaggtggtatcactatgttgcaaagaatgggtactggcttgtttttgatagttccagcctctttgatttccgcctttatcgaagaaagaagaagaaacttggctttgactgaacctatgccaggttttcattctcaaagaggtgctgtttcttctatgtctgctttgtggatggttccacaattgtctttggctggtttgtctgaagcttttgcttccattggtcaaatcgagttctactacaaacagttcccagaaaacatgagatctttcgctggttccttgttgtttttaggtatggcttcttcctcctacctgaactcctttttgatttctatcgttcacagaactaccgacggttcaccatctggtaattggttaccagaagatttgaacaagggcaagttggattacttctactttttgatcaccgccttggtgtctttgaacgtttgttactttatcgtttgcgctaagtggtacagatacaaaggtgacggtgaaactattgatgccgttgaaatggaaactaagaagccagaaagagccgttgtttga

SEQ ID NO: 443 - protein, 585 aa, Platanus occidentalis
MEKNEKAVIADEPKINYRGIKAMPFIIGNETFEKLGTIGVSSNLTVYLTSVFHMKKFSAATLINVFNGTTNVAPLLGAFLSDTYLGRYKTLGFASISSLTGMFLLMLTAAISKLHPPHCETKEFETCIGPTAGQMVFLLGGCAFLVVGAGGIRPCNLAFGADQFNPETDSGKRGINSFFNWYYFTLTFAFMVSLTLIVYVQSNVNWAIGLAIPTFLMFISCALFFLGSRIYVKVKPEGSPLLGVVQVVVAATKKRRLKLPENPDLSLFNYHPPTTLNTKLPYTDQFRFLGKAAIITPEDPINPDGSAADPWRLCGIQQVEEVKCLMRVIPIWASGIIYFVAIVQQQTYAVFQALQSDRHLGAGKFEVPAASYVVFNFLSLTIFIPIYDRIIVPSLRRITGKEGGITILQRMGTGIFLSSLTMFVSALVEERRRSVALSRPTLGAASGGGTVSSLSAFWLIPQLTLSGLAEAFCSVGQIEFYYKQFPENMRSIAGSAFFCGMAMSSYLSGFLVSVVHRTTERAATGNWLPEDLNEGRLDYFYFMIAALGVMNFGYFLVCARWYRYKGGGATSEVIEEGKIAEKHLV

SEQ ID NO: 444 - DNA, 1758 bp, Platanus occidentalis
  source 1..1758: mol_type = other DNA
atggaaaagaacgagaaggccgttattgctgatgaacctaagattaactacagaggtattaaggccatgccattcattattggtaacgaaacctttgaaaagttgggcaccattggtgtttcttctaacttgactgtttacctgacctccgttttccatatgaagaaattttctgctgccaccttgatcaacgttttcaacggtactactaatgttgctccattattgggtgctttcttgtctgatacttacttgggtagatacaagactttgggtttcgcctctatttcttctttgactggtatgttcttgttgatgttgaccgctgctatttctaaattgcatccaccacattgcgagacaaaagaattcgaaacttgtattggtccaaccgctggtcaaatggtttttttgttaggtggttgcgctttcttggttgttggtgctggtggtattagaccatgtaatttggcttttggtgccgatcaattcaacccagaaactgattctggtaagagaggtatcaactctttcttcaattggtactacttcaccttgaccttcgctttcatggtttctttgacattgatcgtctacgtccaatctaatgttaactgggctattggtttggctattccaactttcttgatgttcatttcctgcgccttgtttttcttgggttctagaatctacgttaaggtcaaaccagaaggttctcctttgttgggtgttgttcaagttgttgttgctgctactaagaagagaagattgaagttgccagaaaacccagacttgtctttgtttaattaccatccaccaactaccttgaacaccaaattgccatatactgaccagttcaggtttttgggtaaagctgctattattaccccagaggatccaatcaatccagatggttctgctgctgatccttggagattgtgtggtattcaacaagttgaagaggtcaagtgcttgatgagagttattccaatttgggcctctggtatcatctactttgttgctatagttcaacaacaaacctacgctgtttttcaagccttgcaatctgatagacacttaggtgctggtaagtttgaagttccagctgcttcttacgttgtgttcaactttttgtccctgaccattttcatcccaatctacgatagaatcatcgtcccatccttgagaagaatcactggtaaagaaggtggtatcaccatcttgcaaagaatgggtacaggtatcttcttgtcctctttgactatgttcgtttccgctttggtagaagaaagaagaagatctgttgctttgtctagaccaactttgggtgctgcttctggtggtggtactgtttcttcattgtctgctttttggttgatcccacaattgactttgtctggtttagctgaagctttctgttccgttggtcaaatcgaattctactacaagcaattcccagagaacatgagatctattgctggttccgcttttttttgtggtatggctatgtcatcttacctgtccggttttttggtttccgttgttcatagaactactgaaagagctgctactggtaattggttgcctgaagatttgaatgagggtcgtttggattacttctacttcatgattgctgctttgggtgttatgaacttcggttactttttagtttgcgctaggtggtacagatacaaaggtggtggtgctacttctgaagttattgaagaaggtaagattgccgaaaagcacttggtttga

SEQ ID NO: 445 - protein, 597 aa, Valeriana officinalis
MRMEKMEERDSMEKDDDIDDEEEEPVINYRGIKAMPLIIGNETFEKLGAIGTLSNLLVYLTTVFNMKSITATTILNVFNGTTNFSTLLGAYLSDTYFGRYKTLGFSSIASFLGLLFISLTAVIKWLHPPHCGDEATNCIGPSPWQLTFLFAGFGLMIVGAAGIRPCNLAFGADQFNPNTESGKRGINSFFNWYFFTITFAQMISLTLVVYIQTDVSWAIGLGIPAAFMLISCVLFFMGSRIYVKVKPEGSPFTSIARVIVVAVKKRRLKSPDQPWISLFSYAPLKSINSKLAYTDQFRFLDKAAIVTPEDKINADGSAEDPWRLCSMQQVEETKCVFRVIPIWASAIIYYVAIIQQQQYVVFQALQSNRYFGNTKFQIPAASYTIFSMLSLTLFIPIYDRILVPQLRKLTGKEGGITLLQRMGVGIFLTVLSSFVAALVEQRRRNLALTKPTLGIQPHRGAISSMSGLWLVPQLAITGLAEAFTNVGQVEFYYKQFPENMRSVAGSFFFCEMAASSYLNSFLVTIVHRTTEKAATGNWLPEDLNKGRLDYFYFLVTALGVMNTGYFLWCSKWYRYKGTGGRVVGVEMETKGDDNHIA

SEQ ID NO: 446 - DNA, 1794 bp, Valeriana officinalis
  source 1..1794: mol_type = other DNA
atgaggatggaaaagatggaagaacgtgactctatggaaaaggatgatgatatcgatgacgaagaagaagaaccagtcattaactacagaggtattaaggccatgccattgattattggtaacgaaacctttgaaaagttgggtgccattggtactttgtccaatttgttggtttacctgactaccgtgttcaacatgaagtctattactgctaccaccatcctgaatgttttcaatggtactaccaacttctctaccttgttgggtgcttatttgtctgatacttacttcggtagatacaagaccttgggtttctcttctattgcttctttcttgggcttgctgttcatttctttgaccgctgttattaagtggttgcatccacctcattgtggtgatgaagctacaaactgtattggtccatctccatggcaattgacttttttgtttgctggtttcggtttgatgatagttggtgctgctggtattagaccatgtaatttggcttttggtgccgatcaattcaacccaaatactgaatctggtaagaggggtatcaactctttctttaactggtactttttcaccatcaccttcgctcaaatgatctctttgactttggttgtctacatccaaaccgatgtttcatgggctattggtttgggtattccagctgcttttatgttgatttcctgcgtcttgtttttcatgggttctagaatctacgttaaggtcaaaccagaaggttctccattcacatctattgccagagttatagttgttgccgtcaagaagagaagattgaagtctccagatcaaccctggatttctttgttttcttacgccccattgaagtccatcaattctaaattggcttacaccgaccagttcagatttttggataaggctgctatagttaccccagaggataagattaacgctgatggttctgctgaagatccttggagattgtgttctatgcaacaagtcgaagaaacgaagtgcgttttcagagttattccaatttgggcttccgccattatctactacgttgccattattcaacaacagcagtacgttgttttccaagccttgcaatctaatagatacttcggcaacaccaagttccaaattccagcagcttcttacaccatcttctctatgttgtctttgaccttgttcatcccaatctacgatagaattttggtcccacagttgagaaagttgactggtaaagaaggtggtatcaccttgttacaaagaatgggtgttggtattttcctgaccgttttgtcatcttttgttgctgctttggtcgaacaaagacgtagaaatttggcattgactaagccaactttgggtatccaaccacatagaggtgctatttcttctatgtctggtttgtggttggttccacaattggctattactggtttggctgaagctttcactaatgttggtcaagtcgaattctactacaagcagtttccagaaaacatgagatctgttgccggttcttttttcttctgtgaaatggctgcttcctcctacttgaactcttttttggttaccatcgttcacagaactactgaaaaagctgctactggtaattggttgccagaagatttgaacaagggtagattggactacttctacttcttggttactgctttgggtgttatgaataccggttactttttgtggtgttctaagtggtacaggtacaaaggtactggtggtagagttgttggtgttgaaatggaaactaagggtgatgataaccatatcgcctga

SEQ ID NO: 447 - protein, 595 aa, Eschscholzia californica
MEKSKENKNVEEMEEDFNEEPKKNLKYRGVKVMPFILGNETFEKLGTIGTTSNLMVYLTSVFNLKSVSAATLINVYSGTSNVAPLFGAFLSDTHFGRYKTLLCATTSSFLGMLILTLTAAIHKLHPPHCENKDNSACLGPTHGQLTFLVAGFGFLIIGAGGIRPCNLAFGADQFNPNTESGKRGINSFFNWYYFTFTFAMMTAVTLIVYVQTTIGWGVGLGIPALLMLLSFVLFFAGTKWYVIVKPQGSPFTSIARVIVAAIRKRQLKIPEEPEFTLFNYYPPKTMNSILPSTNQFRYLDKAAIVTEDDKINTDGSPANPWRLCGMQQIEEVKCIIRVLPIWASGIIYYVVIVQAHTYAVIQALQSDRRLGNTGFQIPAATYIIFGMLGLASWIPIYDRIIVPRLRKLTGKEGGISLLQRMGIGLVLSFLTMIIAGVVEGKRREFALTRPTLGIAPKRGAISSLSAFWLVPQLTLSGLIEAFNSIGQVEFYYKQFPENMRSIAGSFFYLTIAGANYLSTFLIFIVHRTTEGSSTGNWLAEDLNKGKLDYFYYMIAGLGVLNFGYFLICAKWYRYKDTIIQMAMETKVSADEKHLV

SEQ ID NO: 448 - DNA, 1788 bp, Eschscholzia californica
  source 1..1788: mol_type = other DNA
atggaaaagtccaaagagaacaagaacgtcgaagaaatggaagaggatttcaacgaagaacccaagaagaacttgaagtacagaggtgttaaggtcatgccattcattttgggtaacgaaacctttgagaagttgggtactattggtactacctccaatttgatggtttacctgacttccgttttcaacctgaaatctgtttctgctgctaccttgatcaatgtctattctggtacttctaacgttgctcctttgtttggtgctttcttgtctgatactcatttcggtagatacaagaccttgttgtgtgctactacttcttctttcttgggcatgttgattttgactttgactgccgctattcataagttgcatccaccacattgtgaaaacaaggataactctgcttgtttgggtccaactcatggtcaactaacttttttggttgctggtttcggtttcttgattattggtgctggtggtattagaccatgtaatttggcttttggtgccgatcaattcaacccaaatactgaatctggtaagaggggtatcaactcttttttcaactggtactacttcactttcaccttcgctatgatgactgctgttactttgatcgtttacgttcaaactacaatcggttggggtgttggtttgggtattccagctttgttgatgttgttgtccttcgttttgtttttcgctggtactaagtggtacgttatcgttaagccacaaggttctccattcacttctattgctagagttatcgttgctgccatcagaaagagacaattgaagattccagaagaaccagagttcaccttgttcaattattacccaccaaagaccatgaactccattttgccatctaccaatcagttcagatacttggataaggctgctatcgttaccgaagatgataagattaacactgatggttctccagctaatccttggagattgtgtggtatgcaacaaatcgaagaggttaagtgcatcatcagagttttgccaatttgggcttctggtatcatctactacgttgttatagttcaagctcatacctacgctgttattcaagccttgcaatctgatagaagattgggtaataccggtttccaaattccagctgctacttacattatctttggtatgttgggtttagcctcctggattccaatctacgatagaattatagtcccaaggttgagaaagttgaccggtaaagaaggtggtatctctttgttgcaaagaatgggtataggtctggtcttgtctttcctgactatgattattgctggtgttgtcgaaggtaagagaagagaatttgctttgactagaccaactttgggtatcgctccaaaaagaggtgctatttcttctttgtctgccttttggttggttccacaattgactttgtctggtttgattgaagccttcaactccattggtcaagtcgaattttactacaagcagttcccagaaaacatgagatcaattgctggttccttcttctacttgactattgccggtgctaattacttgtctaccttcttgattttcatcgtccatagaactaccgaaggttcttctacaggtaattggttggctgaagatttgaacaaaggcaagttggactacttctactacatgattgcaggtttgggtgttttgaacttcggttactttttgatttgtgccaagtggtacagatacaaggataccattattcagatggccatggaaactaaggtttccgctgacgaaaaacacttggtttga

SEQ ID NO: 449 - protein, 593 aa, Catharanthus roseus
MEKKETMDTKPKEEEEEEPQINYRGIKAMPYIIGNETFEKLGAIGTLSNLLVYLTSVFNMKRITAATLLNVFNGTTNFATLIGAFLCDTYFGRYKTLGFASIASFLGLFMITLTAAIKKLHPPHCGVQEIQCEGPKTGQMAFLLSGFALMIIGAGGIRPCNLAFGADQFNPNTESGKRGINSFFNWYFFTITFAQMVSVTLVVYVQSEVNWGIGLAIPAMFMLISCFIFFFGTKIYVIIKPEGSPLASIAQVVVVSVKKRRLKLPEQPWLSLFNYTPPKSINSKLPYTQQLRFLDKAAIITAEDEIKADGSAANPWGLCSMQQVEEAKCVFRVIPIWAAAIIYHIGTTQQQQYVVFQAQQSNRHLIGTKNFQIPAATYTIFSMLSLTLFVPVYDRVLVPSLRKITRKEGGITLLQRLGIGLFLIVPASLISAFVEDRRRNLALTKPMPGIHSPRGAISSMSALWMVPQLTLTGLSEAFASIGQIEFYYKQFPENMRSFAGSLLFLGMAVSSYLNSFLISIVHHTTEGSSSGNWLPEDLNKGRLDYFYFLVTALVFLNVCYFVVCANWYRYKGEGVTSHLVEMETKKPEKAIIV

SEQ ID NO: 450 - DNA, 1782 bp, Catharanthus roseus
  source 1..1782: mol_type = other DNA
atggaaaagaaagaaaccatggacacgaagcctaaagaagaagaggaagaagaaccacagattaactacagaggtattaaggccatgccttacattattggtaacgaaacctttgaaaagttgggtgccattggtactttgtccaatttgttggtttacctgacctccgttttcaacatgaagagaattactgctgctaccctgttgaatgttttcaatggtactactaatttcgccaccttgattggtgctttcttgtgtgatacttacttcggtagatacaagactttgggtttcgcttctattgcttctttcttgggtttgttcatgattactttgaccgctgccattaagaaattgcatccacctcattgtggtgtccaagaaattcaatgtgaaggtccaaaaactggtcaaatggcctttttgttgtctggttttgccttgatgattattggtgctggtggtattagaccatgtaatttggcttttggtgccgatcaattcaacccaaatactgaatctggtaagaggggtatcaactctttctttaactggtacttcttcaccatcaccttcgctcaaatggttagtgttactttggttgtctacgtccaatctgaagttaattggggtattggtttggctattccagctatgtttatgctgatttcctgcttcatctttttcttcggcacaaaaatctacgtcatcatcaaaccagaaggttctccattggcttcaattgctcaagttgttgttgtttccgtcaagaagagaagattgaagttgccagaacaaccatggctgtctttgtttaattacactccaccaaagtccatcaactccaaattgccatatactcagcagttgaggtttttggataaggccgctattattacagctgaggacgaaatcaaagctgatggttctgctgctaatccatggggtttgtgttctatgcaacaagttgaagaggctaagtgcgttttcagagttattccaatttgggctgctgctatcatctaccatattggtacaactcaacaacagcagtacgttgtttttcaagcccaacaatctaacagacacttgatcggtactaagaacttccaaattccagctgctacttacaccatcttctctatgttgtctttgaccttgttcgttccagtttacgatagagttttggtcccatccttgagaaagatcactagaaaagaaggtggtatcaccttgttgcaaagattaggtatcggcttgtttttgatcgttccagcttctttgatctccgcttttgttgaagatagaagaagaaacttggctctgactaagccaatgccaggtattcattctccaagaggtgctatttcttctatgtctgctttgtggatggttccacaattgactttgactggtttgtctgaagcttttgcctccattggtcaaatcgaattctactacaaacagttcccagagaacatgagatcttttgctggttccttgttgttcttaggtatggcagtttcctcttacctgaactccttcttgatttctatcgttcatcacactaccgagggttcttcatctggtaattggttaccagaagatttgaacaagggtcgtttggactacttctactttttggttactgccctggttttcttgaacgtttgttacttcgttgtttgtgcaaactggtacaggtacaaaggtgaaggtgttacttctcacttggtcgaaatggaaactaagaaaccagaaaaggctatcatcgtctaa

SEQ ID NO: 451 - protein, 594 aa, Hypericum perforatum
MDTKMEKNEKVQAMEQVMEKPKPNYRGVKAMPFIIGNETFEKLGTIGTSSNMVVYLTTVFNMKSVSATTLINVFNGTTNLAPLIGAFLSDSYFGRYKTLGFASMSSLTGMFVIMLTAAISKLHPPHCGTKDAGNCTEPTTWQLAFLLVGFGFLVVGAGGIRPCNLAFGADQFNPETESGKRGINSFFNWYYFTFTFAMMVSVTLIVYVQSSINWAIGLAIPTFLMFLSVALYFMGSRLYVKVKPEGSPLIGVIQVFVAATKKRQLKLPNNAPLSLFNYHPITSINSKLPYTDQFRFLDKAAIITPEDSINPDGSAVDPWRLCRMQQVEEVKCIMRVIPIWASGIIFSAAVVQQNTYAVFQALQSDRRLGKSSFEVPAASYIVFAMFSLTIWIPLYDRIIVPSLRKLTGIEGGITLLQRMGIGVFLSVITMLVSALVEERRRSYALTRPTIGFSNNGGAISSMSGLWLIPQLTLVGLSEAFDSIGQVEFYYKQFPENMRSIAGSFLFLSMAGGNYLSGFLVSIVHRLTAKSPTGNWLPEDLNKGRLDYFYYMITGLGVINFGYFLVCARWYRYKGTGGVTIEMAMESKQNEKHMV

SEQ ID NO: 452 - DNA, 1785 bp, Hypericum perforatum
  source 1..1785: mol_type = other DNA
atggacaccaagatggaaaagaacgaaaaggttcaagccatggaacaagttatggaaaagccaaagccaaattacagaggtgttaaggctatgccattcatcattggtaacgaaacctttgagaagttgggtactattggcacttcttccaatatggttgtttacttgactaccgtgttcaacatgaagtctgtttctgctactaccctgatcaatgttttcaatggtactaccaatttggccccattgattggtgcttttttgtccgattcttacttcggtagatacaagactttgggtttcgcttctatgtcatctttgactggtatgttcgttattatgttgaccgctgccatttctaaattgcatccaccacattgtggtactaaggatgctggtaactgtactgaacctactacttggcaattggctttcttgttggttggttttggttttttggttgttggtgctggtggtattagaccatgtaacttagcttttggtgccgatcaattcaacccagaaactgaatctggtaagagaggtatcaactctttctttaactggtactacttcactttcaccttcgccatgatggtttctgttactttgatcgtttacgtccagtcctctattaactgggctattggtttagctattcccacctttttgatgttcttgtctgttgccttgtacttcatgggttctagattatacgttaaggtcaagccagaaggttctccattgataggtgttatccaagtttttgttgctgccaccaaaaagagacaattgaagttgccaaacaacgccccattgtctttgtttaactaccatccaattacctccatcaactccaaattgccatacactgaccaattcagattcttggataaggctgctattatcaccccagaagattctattaacccagatggttctgctgttgatccttggagattgtgtagaatgcaacaagttgaagaggtcaagtgcatcatgagagttattccaatttgggcctctggtattatcttttctgctgctgttgttcaacaaaacacctacgctgttttccaagccttgcaatctgatagaagattgggtaagagttcctttgaagttccagctgcttcttacatcgttttcgctatgttttctttgaccatctggattcccttgtacgatagaattatcgtcccatccttgagaaagttgacaggtattgaaggtggtatcaccttgttgcaaagaatgggtattggtgttttcctgtccgttattaccatgttggtttcagctttggttgaagaaagaagaagatcttacgctttgaccagaccaaccattggtttttctaacaatggtggtgctatctcctctatgtctggtttgtggttgattccacaattgaccttagttggtttgtccgaagctttcgattctatcggtcaagttgaattctactacaagcagttcccagaaaacatgagatctattgctggttccttcctgtttttgtctatggccggtggtaattacttgtcaggtttcttggtttccatcgttcatagattgactgctaaatctccaaccggtaattggttgcctgaagatttgaacaaaggtcgtttggactacttttactacatgatcactggtttgggtgttatcaacttcggttactttttggtttgtgctagatggtacaggtacaaaggtactggtggtgttactattgaaatggccatggaatctaagcaaaacgaaaagcacatggtctga

SEQ ID NO: 453 - protein, 587 aa, Nigella sativa
MDKSENVGVGEEVEKPMIKYGGVKAMPYIIGNETFEKLGTIGSGANLTVYLTTVFNMKSASAATLLNVFNGTTNVTPLLGAFLSDTYFGRYKTLGFASISSFTGMFILTLTAAITKLHPPHCNKGEQCVEPTTCQLAFLLSGFAFLIVGAGGIRPCNLAFGADQFNPNTDAGKKGINSFFNWYYFTFTFAMMVSLTLIVYVQSSINWAIGLAIPAFLMFFSVAFFFWGTKIYVIVKPEGSPLTGVAQVFVAAMKKRRLQLPEKPQLSLFNYYPTNSINSRLPHTDQFKFLDKAAIITPEDGINPDGSAVNPWRLSRIQQVEEVKCLMRVIPIWASGIIVYTAIVQQHTYATFQAVQSDRHFGRTSFQIPAATYIVITYLTLTIWIPVYDRLIVPAARRITGNEGGITLLQRMGVGIVLSALSMLVSGLVEVRRRNYALSGRTMTTADNGGGISSMSAFWLTPQLIFAGLTEAFNTIGQVEFYYKQFPENMRSIAGSFLFFNIALANYLSGFLVSLVHHVTRNSPTGNWLAQDLNKGRLDYFYYLFASLGAINFGYFLICASWYRYKGTGAANIELVSEPKETERHVV

SEQ ID NO: 454 - DNA, 1764 bp, Nigella sativa
  source 1..1764: mol_type = other DNA
atggacaagtccgaaaacgttggtgttggtgaagaggttgaaaagccaatgattaagtatggtggtgttaaggccatgccttacattattggtaacgaaacctttgaaaagttgggcactattggttctggtgctaatttgactgtttacttgactaccgtgttcaacatgaagtctgcttcagctgctactttgttgaatgttttcaatggtactaccaacgtcactccattattgggtgcttttttgtctgatacttacttcggtagatacaagactttgggtttcgcctctatttcttctttcaccggtatgttcattttgactttgactgctgctatcaccaaattgcatccaccacactgtaacaaaggtgaacaatgtgttgaacctaccacttgtcaattggctttcttgttgtctggtttcgcttttttgatagttggtgctggtggtattagaccatgtaatttggcttttggtgccgatcaattcaacccaaatactgatgctggtaagaagggtatcaactctttctttaactggtactacttcactttcaccttcgccatgatggtttctttgacattgatcgtttacgtccagtcctctattaactgggctattggtttggctattccagctttcttgatgttcttttccgttgcttttttcttctggggcacaaaaatctacgttatcgttaagccagaaggttctccattgactggtgttgctcaagtttttgttgctgctatgaagaagagaagattgcagttgccagaaaagccacaattgtctttgtttaactactaccccaccaactccatcaattctagattgccacatactgaccagttcaagttcttggataaggctgctattatcactccagaagatggtattaacccagatggttctgctgttaatccttggagattgtccagaatccaacaagttgaagaggtcaagtgtttgatgagagttattccaatttgggcctccggtattattgtctatactgctatagttcaacaacacacctacgctacttttcaagctgttcaatctgatagacatttcggtagaaccagctttcaaattccagctgcaacttacatcgttatcacttacttgaccttgaccatttggatcccagtttacgatagattgattgtcccagcagctagaagaattactggtaatgaaggtggtatcaccttgttgcaaagaatgggtgttggtatagttttgtccgctttgtctatgttggtttccggtttggttgaagttagaagaagaaactacgctttgtccggtagaactatgactactgctgataatggtggtggtatctcttctatgtctgctttttggttgaccccacaattgatttttgctggtttgactgaagccttcaacaccattggtcaagttgaattctactacaagcaattcccagagaacatgagatctattgctggttcctttctgttcttcaatattgctttggccaactacttgtccggtttcttagtttctttggttcatcacgttaccagaaactctccaactggtaattggttggctcaagatttgaacaagggtagattggactacttctactacttgtttgcttctttgggtgctatcaacttcggttactttttgatttgtgcttcctggtacaggtacaaaggtactggtgctgctaatatcgaattggtttctgagccaaaagaaaccgaaagacacgttgtttga

SEQ ID NO: 455 - protein, 605 aa, Sanguinaria canadensis
MMKCFHFSSSSPSSFPTKMSDADEDPSQIQLVTQRKPGGWKSMPYIIGNETFERLATFGLLANFMVYLLKEFHMDQVFATNVVNIWSGTTNFAPLVGAFISDAYLGKFRTLAYASLASLLGMVVLTLTAVIPELHPPLCTSQQLQDGQCIGPSTGQLGVLYIALGLLTLGAAGIRPCSLPFGVDQFDQTTDEGKRGVNSFFNWYYFTFTIVVMIALTLVVYIQDTISWSWGLGIPTILMFCSILLFFFGTRIYVYVPPGGSVFSAIAQVFVSAYKKRRLELPRSTEELQGVLYDPPLKGTVLSKLPLTNQFRILNKAAIIIEGRVNADSSRSNQGKLCSIQQVEEVKCLIRIIPIWASGIICFTSMAQQGTFTVSQALKMDRHLGPKFHIPAGSLGVISMLTLGLWVPFYDRIFVPALRKITKQEGGITLLQRMGIGMVFSILSMVVAGFIEEKRRQSANSHSRPDGIAPISVFWLAPQLILMGLAEAFNIIGQIEFYNRQFPEHMRSIANSLFFCTMAGANYLSSVIVAVIHDTTGKLGRPDWLYKDINSGKLDYFYFLIAGLGVLNLIYFLVVAHRYHYKASVPVGAEDMDVVELSLTKHVEP

SEQ ID NO: 456 - DNA, 1818 bp, Sanguinaria canadensis
  source 1..1818: mol_type = other DNA
atgatgaagtgcttccacttctccagttcttctccatcttctttcccaacaaaaatgtccgatgctgatgaagatccatctcaaattcaattggtcacccaaagaaaaccaggtggttggaaatctatgccttacattattggtaacgaaaccttcgaaagattggctacttttggtttgttggctaacttcatggtctacctgttgaaagaattccacatggatcaagttttcgctaccaacgttgttaacatttggtctggtactactaatttcgctccattggttggtgctttcatttctgatgcttacttgggtaaattcagaaccttggcttatgcttctttggcctctttgttaggtatggttgttttgactttgaccgccgttattccagaattgcatccaccattgtgtacctctcaacaattgcaagatggtcaatgtattggtccatctactggtcaattgggtgtcttgtatattgcattgggtttgttgactttgggtgctgctggtattagaccatgttctttgccatttggtgttgaccaattcgatcaaactactgacgaaggtaagagaggtgttaactcttttttcaactggtattacttcaccttcaccatcgttgttatgattgctttgaccttggttgtctacatccaagatacaatttcttggtcttggggtttgggtattccaaccattttgatgttctgcagcatcctgttgtttttcttcggtactcgtatctacgtttatgttccacctggtggttctgttttttctgctattgctcaagtttttgtctccgcctacaaaaagagaagattggaattgccaagatccaccgaagaattgcaaggtgtattatatgatccacctttgaagggtactgtcttgtctaaattgccattgactaaccagttcaggattttgaacaaggccgccattattatcgaaggtagagttaatgctgactcctctagatccaatcaaggtaaattgtgctccatccaacaagtcgaagaggttaagtgcttgattaggattattccaatttgggcctccggtattatttgctttacttctatggctcaacagggcacttttactgtttctcaagctttgaagatggacagacatttgggtccaaagtttcatattccagctggttcattgggtgtgatttctatgttaactttaggtttgtgggtcccattctacgatagaatttttgttccagccttgaggaagatcactaagcaagaaggtggtattaccttgctacaaagaatgggtattggcatggttttcagcatcttgtcaatggttgttgccggtttcattgaagaaaagcgtagacaatctgccaactctcattctagaccagatggtattgctccaatttctgttttctggttggctccacaattgatcttgatgggtttagctgaagccttcaacattatcggtcaaatcgaattctacaacaggcaattcccagaacacatgagatctattgctaactctttgttcttctgtactatggctggtgctaactacttgtcatctgttatcgttgctgttatccatgataccactggtaaattaggtagacctgattggttgtacaaggacatcaattctggtaagttggactacttctacttcttgattgctggtttgggtgtgttgaacctgatctactttttagttgttgcccacagataccattacaaagcttcagttccagttggtgctgaagatatggatgttgttgaactgtctttgaccaaacacgttgaaccatga

SEQ ID NO: 457 - protein, 615 aa, Thalictrum flavum
MKENNSSSSSVPSWLSCSFKCFPISSSSSSAVKEKEEKFDIVEETTISRRKPGGWRSMPYVLGNETFERLATIGLLANIMVYLLNEYHMDQVFANNVINIWSGTTNFGPLIGAYISDAHIGKFKTLAFASFASLLGMISLTLTAAIPRLHPPPCTKIQLQHNQCMGPTKGQLGILYMSLGFLSIGAAGIRPCSLPFGVDQFDSTTEEGRKGIASFFNWYYFTFTIVIMIALTLIVYIQTSVSWVWGLGIPTTLMFCSIILFFIGTRVYMYVPPGGSVFSGIGQVFAAAYKKRGLKLPSEEELPHVVYDPSLKGTAIISKLPLTHQFSFLTKAAVVLEGEVGEDGSRLDKWSLCSVQQVEEVKCLLRVVPIWASGIICLTSMTQQGTFTVSQALKMDRHLGPKFQIPAGSLGVISMLALGLWVPFYDRVLVPQLRKITKHEGGITLLQRMGIGMVFSVLSMVAAGIFEEKRRRSAILHASPDGIAPISVLWLSPQLILMGLAEAFSIIGQIEFYYKQFPEHMKSFANSLLFCTMAGASYLSSMVASIVHSNSDWLDKDINKGRVDYFYYLIAAMGVLNLLYFLVVASRYRYKAEVPVEGEDAPIDIELSKAKHIDN

SEQ ID NO: 458 - DNA, 1848 bp, Thalictrum flavum
  source 1..1848: mol_type = other DNA
atgaaggaaaacaactcctcctcctcatctgttccatcttggttgtcttgttctttcaagtgcttcccaatctcctcttcttcatcttctgctgtcaaagagaaagaagagaagttcgatatcgttgaggaaaccaccatttctagaagaaaaccaggtggttggagatctatgccatatgttttgggtaacgaaaccttcgaaagattggctactattggtttgttggctaacatcatggtctacttgttgaacgaataccacatggatcaagttttcgccaacaacgttatcaacatttggtctggtactaccaatttcggtccattgattggtgcttacatttccgatgctcatatcggtaagtttaagactttggcttttgcttccttcgcttctttgttgggtatgatttctttgactttgaccgctgctattccaagattgcatccaccaccatgtactaagattcaattgcaacacaatcaatgcatgggtccaacaaaaggtcaattgggtatcttgtacatgtccttgggtttcttgtctattggtgctgctggtattagaccatgttctttgccatttggtgttgaccaattcgattctactactgaagaaggtagaaagggtattgcctcttttttcaattggtactacttcaccttcaccatcgttattatgattgccttgaccttgatcgtctacatccaaacatctgtttcttgggtttggggtttgggtattccaactactttgatgttctgctccatcattttgttcttcatcggtactagagtctacatgtatgttccacctggtggttctgttttttctggtattggtcaagtttttgctgctgcctataagaagagaggtttgaaattgccatctgaagaagaattgccacacgttgtttatgacccatctttgaaaggtactgccatcatttctaagttgccattgactcaccaattctcgtttttgacaaaagctgccgttgttttggaaggtgaggttggtgaagatggttctagattggataagtggtctttgtgctctgtccaacaagttgaagaggttaagtgtttgttgagagttgttccaatttgggcctctggtattatttgtttgacctctatgactcaacagggcacttttactgtttctcaagctttgaagatggacagacatttgggtccaaagtttcaaattccagctggttctttgggtgtcatttcaatgttggctttaggtttgtgggttccattctacgatagagttttggttccacagttgcgtaagattaccaaacatgaaggtggtatcaccttgttgcaaagaatgggtattggtatggttttctccgttttgtcaatggttgctgccggtatttttgaggaaaaaagaagaagatccgctatcttgcatgcttctccagatggtattgctccaatttctgttttgtggttgtccccacaattgatcttgatgggtttagctgaagccttctctattatcggtcaaattgagttctactacaagcagttcccagaacacatgaagtcttttgctaactccttgttgttctgtactatggctggtgcttcttacttgtcatctatggttgcttctatcgtccactctaattctgattggttggataaggatatcaacaagggtagagttgactacttctattacttgattgctgccatgggtgtgttgaacttgttgtactttttggttgttgcctccagatacagatacaaagctgaagttccagttgaaggcgaagatgctcctattgatattgaattgtccaaggccaagcacatcgataactaa

SEQ ID NO: 459 - protein, 584 aa, Glaucium Flavum
MEEEKVTTPAETNIKYGGMKTMPFIIGNEMFEKLGTWGTSSNLVVYFTTVFNMKRVTAAIVLNVFSGTTFFAPLIGAFLADAYVGRFKALGFASVASLMGMVLLMLTATFSTLRPPDCGTKDNYLCVQPTAPQWSFLSFALGLLVIGAAGIKPCNLPFGADQFNPKTDSGKSSIDSFINWYYFVLSSCLLVSMTLIIYVQSNVSWAVGLALPASLMLIACVLFFSGSKIYVIVKPEGSPITNIIQVLVAATKKRSLTQPGNPEVSLFNYFSTNSINSRLNHTKQFRFLDKGAIATVEDRINADGSAANPWSLCRMQQVEEVKCLVKVLPIWFSAAIFHITLAQQQTYAVYQALQSDRHLGKSNFEIPAASYLAFSWLSMAIWIPVYDRFLVPLLRKVTGNKTGITPLQRMGIGTFLSIITMLVSALVEQKRRNFALTQPTLGIAKGGGAISSMSGLWLIPQLSINGIAEALCFVSQVEFYLTQFPENMRSIAMSFFFVSAAVASYLSGFMVSIVHQTTEGAASGNWLPEDLNKGRLDYFYYLITVMEVVNLVYFIACARWYKYKDTSATVELALETKDLETPSV

SEQ ID NO: 460 - DNA, 1755 bp, Glaucium Flavum
  source 1..1755: mol_type = other DNA
atggaagaagagaaggttactaccccagctgaaactaacattaagtacggtggtatgaagaccatgccattcattattggtaacgagatgttcgaaaagctaggtacttggggtacttcttctaacttggttgtttacttcaccaccgtgttcaacatgaagagagttactgctgctatcgtcttgaatgttttctctggtactactttcttcgccccattgattggtgcttttttggctgatgcttatgtcggtagattcaaggctttgggttttgcttctgttgcttctttgatgggtatggtcttgttgatgttgactgctactttttctaccttaagaccaccagattgtggtactaaggataactatttgtgtgttcaacctactgctccacaatggtcttttttgtcttttgccttgggtttgttggttattggtgctgctggtattaagccatgtaatttgccatttggtgccgatcaattcaacccaaaaactgattctggtaagtcctccatcgattcctttatcaactggtattacttcgtcctgtcctcttgcttgttggtttctatgactttgatcatctacgtccagtctaatgtttcttgggctgttggtttggctttgccagcttctttaatgttgattgcttgcgtcttgttcttcagcggttctaaaatctacgttatcgttaagccagaaggttccccaattaccaacattatccaagttttggttgctgccactaagaagagatctttgactcaaccaggtaacccagaagtttctttgttcaactacttcagcaccaactccatcaactctagattgaatcataccaagcagttcaggttcttggataagggtgctattgctactgttgaagatagaatcaatgctgatggttctgctgctaatccatggtctttgtgtagaatgcaacaagttgaagaggttaagtgcttggttaaggttttgccaatatggttttccgctgccattttccatattaccttggctcaacaacaaacctacgctgtttatcaagccttgcaatcagatagacacttgggtaaatccaacttcgaaattccagctgcttcttacttggctttttcttggttgtctatggccatttggattccagtttacgatagatttttggtccccttgttgagaaaggttactggtaacaaaacaggtatcaccccattgcaaagaatgggtattggtactttcttgtccatcatcaccatgttggttagtgctttggttgagcaaaagagaagaaattttgctttgacccaacctaccttgggtattgctaaaggtggtggtgctatttcttctatgtctggtttgtggttgatcccacaattgtccattaacggtattgctgaagctttgtgcttcgtttctcaagttgaattttacctgactcagttcccagaaaacatgagatctattgctatgtccttcttctttgtttctgctgcagttgcttcatacttgtccggttttatggtttccatcgttcatcaaactactgaaggtgctgcttcaggtaattggttgccagaagatttgaacaagggtagattggactacttctactacttgatcaccgttatggaagttgtcaacctggtttactttattgcttgtgctagatggtacaagtacaaggatacttctgcaactgttgaattggccttggaaactaaggatttggaaactccatctgtctaa

SEQ ID NO: 461 - protein, 604 aa, Sanguinaria canadensis
MAATKLQPKLLNQTLMISQDQLILDEEAAAPSSTHVGRQRGGWITLPFVTVSLLGLTVAASGWGSNIIVFLIGQFNIKSIEAAQISNIISGTTNFLPILAAIIADSFFGSFSVVAVSSFISFMGLILLTLTVTVRSLRPSSQCVDNDTLACETTPSGSTLQFAVLYTALTLTSLGLGGTRFTIATMGADQFDKPKDQASFFNWYFVTLYIASTIGVVGVVYIQDNVGWDWGFGISLAANAVGLIVFLAGKRYYRHVKPDGSPFKSLARVVVATIRKRKMSVSSEAKTYYYGYSTGGATIEPCPSPTSSFRFLNRAALKTEGDSHEDGSVAKPWRLCTVQQVEDLKTLIRIFPLWSTSIFLSTPIGIQISLAVLQALTMDRHIGRPGHFKVPAGSFLVFSLTSTAITLTLFDRFLLPTYQRVTRRPLTPLQRVGIGHVLNILGMAASALVEWRRLHVARSHQLTSSSSSSSTIVPMSAFWLVIPLAIVGVGEAFHFPGQVALYYQEFPASLHSTSTAMISLLIAVGFYLSTAMIDLVQRVTGWLPNNINEGRLDNMFWLLVVIGVINFGYYLTCSVLYEYQNLDDQYQKSIKVDDDDDQPRQEQN

SEQ ID NO: 462 - DNA, 1815 bp, Sanguinaria canadensis
  source 1..1815: mol_type = other DNA
atggctgctactaagttgcaacccaagttgttgaatcaaaccttgatgatctcccaagaccagttgattttggatgaagaagctgctgctccatcttctactcatgttggtagacaaagaggtggttggattactttgccattcgttactgtttctttgttgggtttgactgttgctgcttctggttggggttctaacattatcgtttttttgatcggccagttcaacatcaagtctattgaagctgctcagatctccaacattatttctggtactaccaacttcttgccaattttggctgctattattgccgattctttcttcggttctttctccgttgttgctgtttcctctttcatttctttcatgggcttgatcttgttgactttgacagttaccgtcagatccttaagaccatcttctcaatgtgttgataacgataccttggcttgtgaaactactccatctggttctacattgcaatttgctgtcttgtacactgctttgaccttgacctctttaggtttaggtggtactagattcactattgctactatgggtgctgatcaattcgataagccaaaggatcaagcctcttttttcaactggtacttcgtcaccttgtacattgcatctactattggtgttgttggtgtcgtttacatccaagataacgttggttgggattggggttttggtatttctttagctgctaatgctgttggcttgatcgttttcttggctggtaaaagatattacagacacgttaagccagatggctctccattcaaatctttggctagagttgttgttgccaccattagaaaaagaaagatgtccgtttcttccgaagctaagacttattactacggttattctactggtggtgctaccattgaaccttgtccatctccaacttcatctttcagatttttgaacagagctgccttgaaaaccgaaggtgattctcatgaagatggttctgttgctaaaccttggagattgtgtactgttcaacaagtcgaggatctaaagaccttgattagaattttcccactgtggtccacctccatttttttgtctactccaattggtatccagatctctttggctgttttacaagctttgaccatggatagacatattggtagaccaggtcattttaaagttccagccggttcttttctggttttctctttgacttctaccgctatcactttgactttgttcgacagattcttgttgccaacctaccaaagagttactagaaggccattgactccattgcaacgtgttggtattggtcatgtcttgaacattttaggtatggctgcttcagctttggttgaatggcgtagattgcatgttgctagatctcatcaattgacctccagttcttcatcttcttctactatcgttccaatgtccgctttttggttggttattccattggctatcgttggtgttggtgaagcttttcattttccaggtcaagttgccttgtattaccaagaatttccagcctcattgcattctacatccactgctatgattagcttgttgattgctgttggtttctacttgtctaccgccatgattgatttggttcaaagagtaactggttggctgccaaacaatattaacgaaggtagattggacaacatgttctggttgttggttgttatcggtgttatcaacttcggttactacttgacttgttccgtcttgtacgaataccagaacttggacgatcagtaccaaaagtccattaaggttgatgatgatgacgatcagccaagacaagaacaaaactga

SEQ ID NO: 463 - protein, 481 aa, Macleaya cordata
MAMNIEMIEEGVINHQAETNQNKLSAGHHGDYEHHEDYSKKSLMEKWGLLFLYCICSAVGTIGGPLLLRLYFLHGGNRKWLSSGLQTAGFPILVIPLAILYFKRDRTPCSVQFFASPKLLLSSIIIGILLGVNNFMYSYGLSFLPVSTSSILISTQLIFTALFAFIMVRQKFSPYSINSIVVMTLGSVLLGFGKSGDRPEGVSSSQYLLGFILSIGAAALGGFVLPCTEVAYAKASKVLTYPIVLQFQFCMALSATIFCIIGMLVNKDFSAMQREANEYELGAMKYYLVLVSSAVVWQVMYIGTLGIIFCTTSLFAGIISAVLLPLTEIAAVIVFHEKFTGEKGMALALGLWGFSSYFYGSYRESKKQTKTPHEIDDTSKTKLRAVNGYSKIRIRFESITLSESPRQLQAPSRSEASLQYCSVQICKGLVLLCPDLLNLFERLLIRPDLQGREKVAGLKKKGLLVKDDLPWPDLALHVLSW

SEQ ID NO: 464 - DNA, 1446 bp, Macleaya cordata
  source 1..1446: mol_type = other DNA
atggccatgaacatcgaaatgatcgaagaaggtgttatcaaccatcaggctgaaactaatcagaacaaattgtctgctggtcatcacggtgattacgaacatcatgaagattactccaaaaagtccctgatggaaaaatggggtttgttgttcttgtactgcatttgttcagccgttggtactattggtggtcctttgttgttgaggttgtatttcttgcatggtggtaacagaaagtggttatcctctggtttacaaactgctggtttcccaattttggttattccattggctatcctgtacttcaagagagatagaactccttgctctgttcaatttttcgcttctccaaagctgctgttgtcctctattatcattggtatcttgttgggcgtcaacaacttcatgtattcttacggtttgtccttcttgccagtttccacttcctctattttgatctctacccaattgattttcaccgctttgttcgccttcattatggtcagacaaaagttctctccatactccatcaactccatcgttgttatgactttgggttccgttttgttaggtttcggtaaatctggtgatagacctgaaggtgtttcttcctctcaatatttgttgggcttcatcttgtctattggtgctgctgctttaggtggttttgttttgccatgtactgaagttgcttacgctaaagcttctaaggttttgacctatccaatcgtcttgcaattccaattctgtatggctttgtctgctaccattttctgcattatcggtatgttggttaacaaggatttctccgctatgcaaagggaagctaatgaatatgaattgggtgccatgaagtactacttggtcttggtttcttcagctgttgtttggcaagttatgtacattggtactctgggtattatcttctgtaccacctctttgtttgccggtattatttcagcagttttgttgccattgaccgaaattgctgctgttatcgtttttcacgaaaagttcactggtgaaaaaggtatggcattggctttaggtttgtggggtttttcttcttacttctacggttcctacagggaatctaagaagcaaacaaaaactccacacgaaatcgatgatacctccaagactaagttgagagctgttaatggttactccaagatcagaatcaggttcgaatctatcaccttgtctgaatctccaagacaattgcaagctccttctagatctgaagcctctttacaatactgttccgtccaaatctgtaagggtttagttttgttatgccccgacttgttgaatttgttcgaaaggttgttgatcagaccagacttgcaaggtagagaaaaagttgctggtttgaagaaaaaaggcttgttggtcaaagatgatttgccatggccagatttggctttacatgttttgtcttggtaa

SEQ ID NO: 465 - protein, 384 aa, Papaver somniferum
MSIETPETLGPNQNGNPKTNIEKPIKTRNWLLIVINCALVACGAIGGPLLMRLYYLHGGSRKWLSSCLQTAGFPILIFPLIFLYIKSKLSKTNKDQTSSFYIEPKLFVSAIAIGILFGFANFMYALGLSYLPVSTSSILFATQLCFTAFFAWLIVKQKFTAFIINAVVVMTLGSVLLGINTNGDRPIGVSKAQYLMGFLMTLAAAALTGLVMPLIELTFSKATRRVTYSTLLQLQFTYSLFATGLNVIGMLINKDFQAIPREADEFEFGKHKYYMIIVLTAITWQLATLGFFGLILYTSALFNGIYGSLLFPFTGVAAVIVYHENFTGLKGMALALCLWGFFSYFYGEYKMMKKVGNNERHGKVEEVENQPKRLDDQEPPYRLV

SEQ ID NO: 466 - DNA, 1155 bp, Papaver somniferum
  source 1..1155: mol_type = other DNA
atgtccattgaaactccagaaaccttgggtccaaatcaaaatggtaatccaaagaccaacatcgagaagccaatcaagactagaaattggttgttgatcgttatcaactgcgctttggttgcttgtggtgctattggtggtccattattgatgaggttgtattacttgcatggtggttccagaaaatggttgtcctcttgtttacaaactgctggtttcccaattctgatcttcccattgattttcttgtacatcaagtccaagctgtccaagactaacaaggatcaaacttcctcattctacatcgagccaaagttgttcgtttccgctattgcaattggtatcttgtttggtttcgccaactttatgtatgccttgggtttgtcttatttgccagtttccacttcctctattttgttcgctactcaattgtgtttcaccgctttttttgcttggttgatcgtcaagcaaaagttcactgccttcattattaacgccgttgttgttatgactttgggctctgttttgttgggtattaacactaatggtgacagaccaatcggtgtttctaaagctcaatacttgatgggtttcttgatgactttagctgctgctgctttgactggtttggttatgccattgattgaactgactttctctaaggctactagaagagttacttactccaccttgttgcagttgcaattcacctattctttgtttgctaccggtttgaacgttatcggcatgttgattaacaaagacttccaagccattccaagagaagctgacgaatttgaattcggtaaacacaagtactacatgatcatcgttttgaccgctattacttggcaattggctactttgggttttttcggtttgatcttgtacacctctgctttgtttaatggtatctacggctctttgttgttcccattcactggtgttgctgctgttatagtttaccacgaaaatttcactggcttgaaaggtatggctttggctttgtgtttgtggggttttttttcttacttctacggcgagtacaagatgatgaagaaagttggtaacaacgaaagacacggtaaggttgaagaagttgaaaaccagccaaaaagattggatgatcaagaaccaccttacaggttggtttga

SEQ ID NO: 467 - protein, 391 aa, Papaver somniferum
MATSTMNIETPETLGPHQNGNSKPHIEETIEAKNWLLLIINCALVFCGVIGCPLLMRLYYLHGGSRKWLTASLEAAGFPVLIFPLIFLYIKSKSSTQNNDQSTSFCMEPKLFLWSAIVGIGYGVAHFMYAWGFSYLPVSTSTILSATQLCFTAFFAWLIVKQKITAFIINAVVVMTLGSVLLGINTNGDRPIGVSKARYLQGFLLTLAASVLCGSMMPLIELAYSKATRNVTYATLLQFQITLSLVATGLDVIGMLINKDFQAIHREADEFGLGKSKYYMIIIFTALTSQLASIGFLGVILYTNALFIGIYGSVLLPFIEVAGVIFFHESFTGLKGMALALCLWGFSSYFYGEYKLMNKAGNNKSAVEKIDEKVENEPKKLDDQEPPYNTV

SEQ ID NO: 468 - DNA, 1176 bp, Papaver somniferum
  source 1..1176: mol_type = other DNA
atggctacttccaccatgaacattgaaactccagaaactttgggtccacatcaaaatggtaattccaagccacatatcgaagaaaccattgaagctaagaactggctgttgttgattattaactgcgctttggttttctgcggtgttattggttgtccattattgatgaggttgtactacttgcatggtggttctagaaaatggttgactgcttctttggaagctgctggttttccagttttgattttccctttgatcttcctgtacatcaagtccaaatcttctacccaaaacaacgaccaatctacctcattctgtatggaacctaagttgtttttgtggtctgccatagttggtattggttatggtgttgctcatttcatgtatgcttggggtttttcttacttgccagtttctacctccactattttgtctgctactcaattgtgtttcaccgctttttttgcttggttgatcgtcaagcaaaagattaccgccttcattattaacgccgttgttgttatgactttgggctctgttttgttgggtattaacactaatggtgacagaccaatcggtgtttctaaagctagatacttgcaaggtttcttgttgactttggctgcttcagttttgtgtggttctatgatgccattgattgaattggcttactctaaggctactagaaacgttacttacgctaccttgttgcaattccaaatcaccttgtctttggttgctactggtttggatgttatcggcatgttgattaacaaggacttccaagctattcacagagaagctgatgaattcggtttgggcaaatctaagtactacatgatcattatcttcaccgccttgacttctcaattggcttctattggtttcttgggtgttatcttgtacaccaacgctttgttcattggtatctacggttctgtcttgttgccattcatagaagttgctggtgttatattcttccacgaatctttcactggtttgaaaggtatggctttggctttgtgtttgtggggtttctcttcttacttttacggtgagtacaagctaatgaacaaggctggtaacaacaagtctgccgttgaaaaaattgacgaaaaggttgaaaacgagccaaagaagttggacgatcaagaaccaccttacaacactgtttga

SEQ ID NO: 469 - protein, 413 aa, Papaver somniferum
MDIEAVSTNEGAATNYNHGGNHQSNLIVPNNHEDDLQSTANPITQNRVIKWKLLIVFCFFSAFGYLGGPLLQRLYYTHGGGRKWLSSMLQTAGFPVLVAPLSYIYIKKVNGPSYDSSWVFMMEPKLFIYSATMGVVLGLDNYMYSAGLFYLPVSTSSLLFSTQLAFTAVFAFIIVRQKFTFYSFNSVVLMTLGAVVLALNTSSDKSPGTTQQQYYLGFFLTLAGAALAGLCMPLIELAYGKSSKPITYSVVMQFQFVLSLFSTLVCMIGMAINNDFKVIPREGRNFGLGETKYYFLIVATAIVYQLFTIGFMGIIYCTSSLFAGIFTTCLLPFSQVAATIAFHEKFTGQKGMSLALCLWGFVSYFIGEYKKTKKPHPIAYDNKAEELKEKLDQLTDSNTMEGSHKSESRFVHP

SEQ ID NO: 470 - DNA, 1242 bp, Papaver somniferum
  source 1..1242: mol_type = other DNA
atggatatcgaagctgtttctaccaatgaaggtgctgctactaattacaatcatggtggtaaccatcagtccaacttgatcgttccaaacaatcatgaagatgacttgcaatctactgctaacccaatcactcaaaacagagttatcaagtggaagctgttgatcgttttctgtttcttttctgccttcggttacttaggtggtccattattgcaaaggttgtactatacacatggtggtggtagaaaatggctgtcatctatgttgcaaactgctggttttccagttttggttgctccattgtcttacatctacatcaagaaagttaacggtccctcctatgattcttcttgggtttttatgatggaacccaagctgtttatctactctgctactatgggtgttgttttgggtttagacaactacatgtattccgctggtttgttctatttgccagtttctacttcctccttgttgttctctactcaattggcttttactgctgttttcgccttcattatcgtcagacaaaagttcaccttctacagcttcaattccgttgttttgatgactttgggtgctgttgttttagctttgaacacctcttctgataagtctccaggtactactcaacaacaatattacttgggtttcttcttgactttggctggtgctgctttggcaggtttgtgtatgccattgattgaattggcttacggcaaatcttccaagccaattacttactccgttgtcatgcaattccaattcgtcttgtctttgttttctaccttggtctgcatgattggtatggccattaacaacgatttcaaggtcattccaagagagggtagaaattttggtttgggtgaaacgaagtactacttcttgatagttgctaccgctatcgtttaccagttgttcactattggtttcatgggtattatctactgcacctcatctttgttcgctggtattttcactacttgcttgttgccattttcacaagttgctgctaccattgcttttcatgagaagtttactggtcaaaagggtatgtctttggctttgtgtttgtggggttttgtctcctactttattggcgagtacaaaaagactaagaagccacatccaattgcctacgataacaaagccgaagaattgaaagaaaagttggaccaattgaccgactctaacactatggaaggttctcataagtccgaatccagattcgttcatccatga

SEQ ID NO: 471 - protein, 384 aa, Papaver somniferum
MIIETLDILGPNQNGNSGTHTQKPIKTRNWLLIIINCALVFCGVIGGPLLMRLYYLHGGSRKWLSSFLQTAGFPVLIFPLIFLYIKPKLSTQNNDQSSSFFMEPKLFLWSAIVGIVFGVSNFMYALGLSYLPVSTSTILFATQLCFTAIFAWLIVKQKFTAFIINAVIVMTLGSILLGINTNGDRPIGVSKTQYLIGFLMTLAAAALTGLGTPFVELSFIKATRNITYPTLLQFQVILCLFGTCLNVIGMLINKDFQAIPREADMFELGKSKYYMIICLTALTWQLSGIGLVGLILYTNALFNGIYVSVLVPFTEVAAVIFFHEKFTGLKGMALALCLWGFSSYFYGEYKMMNKVGDNETHEKIEEAESEPKRLEDQQAPYSTV

SEQ ID NO: 472 - DNA, 1155 bp, Papaver somniferum
  source 1..1155: mol_type = other DNA
atgatcatcgaaaccttggatatcttgggtccaaatcaaaatggtaactctggtactcatacccagaagccaatcaaaactagaaactggttgctgatcattatcaactgcgctttggttttctgtggtgttattggtggtccattattgatgaggttgtactacttgcatggtggttctagaaagtggctatcttctttcttgcaaactgctggttttccagtcttgattttccctttgatcttcctgtacatcaagccaaaattgtctacccaaaacaacgaccagtcctcctcatttttcatggaacctaagttgtttttgtggtccgctatagttggtatcgttttcggtgtttctaacttcatgtatgccttgggtttgtcttacttgccagtttccacttccactattttgttcgctactcaattgtgcttcaccgctatttttgcttggttgatcgttaagcaaaagttcaccgccttcattattaacgccgttatcgttatgactctgggctcaattttgttgggtattaacactaatggtgacagacctattggtgtctctaagactcaatacttgatcggtttcttgatgactttggctgctgctgctttgactggtttgggtactccatttgttgaactgtctttcattaaggccaccagaaacattacttacccaaccttgttgcaattccaagtcattttgtgtttgttcggcacctgtttgaacgttattggcatgttgattaacaaggacttccaagccattccaagagaagctgatatgttcgaattgggcaaatccaagtactacatgattatttgcttgaccgctttgacctggcaattgtctggtattggtttggttggtttgatcttgtacactaacgctttgttcaacggcatctacgtttctgttttggttccattcactgaagttgctgccgttatattctttcatgagaagttcactggtttgaaaggtatggctttggctttgtgtttatggggtttttcctcttacttttacggcgagtacaagatgatgaacaaagttggtgataacgaaacccacgaaaagattgaagaagctgaatctgaacccaagagattggaagatcagcaagctccatattctaccgtttga

SEQ ID NO: 473 - protein, 373 aa, Glaucium Flavum
MNPDLDLQTYTEYPAKTKNWPLIILNTVIMTIGVIGGPLLMRLYYIHGGNRRWLSSCIQNAGFPILLIPLTFLFFQYSKTPHQENHHLSSSPLSSKPSSFLMEPKLFLSSSFVGILFGLNNFMYSLGLSYIPISTSSLLFATQLAFVAFFAWLIVKQQFTAYSINSVVLMTLGSILLGVKNDGDRPVGVTKAEYMLGFLLTLGSAALVGFILPLVELSYSKATRHVNYTTILQYQLNLALFSTIFNSIGMVINKDFQAIPREASEFELGKTMYYTILITGAIIWQLSFIGGLGVILYTSSLFSGILTSVLLPFTEIAAVIVYRESFTGLKGMALALCLWGFTSYFYGEYKMMKNMKTKTSEKVVDNDEEPCTV

SEQ ID NO: 474 - DNA, 1122 bp, Glaucium Flavum
  source 1..1122: mol_type = other DNA
atgaacccagacttggacttgcaaacctatactgaatatccagctaagactaagaactggccattgattattttgaacaccgtcattatgaccatcggtgttattggtggtccattattgatgaggttgtactacattcatggtggtaacagaagatggttgtcctcttgtattcaaaatgctggtttccccattctgttgatcccattgacttttttgttcttccagtactctaagaccccacatcaagaaaaccatcacttgtcatcttctccattgtcctctaagccatcctcatttttgatggaacctaagctgttcctgtcctcttcttttgttggtattttgttcggcttgaacaacttcatgtacagcttgggtttgagctatattccaatctccacttcgtctttgttgttcgctactcaattggcttttgttgcttttttcgcttggttgatcgtcaagcaacaattcactgcttactccatcaactccgttgttttgatgactttgggttccattttgttgggtgttaagaacgatggtgatagaccagttggtgttacaaaagctgagtacatgttgggtttcttgttgactttaggttctgctgctttggttggtttcattttgccattggttgagctgtcttactctaaggctactagacatgttaactacaccaccatcttgcaataccaattgaacttggctttgttcagcaccatcttcaactctattggtatggttatcaacaaggacttccaagctattccaagagaagcctctgaatttgaattgggtaagactatgtactacacgatcttgattaccggtgccattatttggcaattgtctttcattggtggtttgggcgttatcttgtacacatcttctttgttctccggtatcttgacctctgttttgttgccattcactgaaattgctgccgttatcgtttacagagaatctttcactggtttgaaaggtatggctttggctttatgtttgtggggttttacctcttacttttacggtgagtacaagatgatgaagaatatgaagaccaagacctccgaaaaggttgttgacaacgatgaagaaccatgtaccgtttga

SEQ ID NO: 475 - protein, 383 aa, Papaver somniferum
MATSTPLNMEAPEILGTTQNGNSKTHVEKPTKTKNWLMIIINSAFVTIGLVGGPLLIRLYYLHGGNRKWLTSCLQSAGFPILIFPLTFLFIQSKLSTESPSFWLEPKLSLWSAIIGILFGLINFMYSSGLSYIPVSTSSLLLATQLCFVAFFSWLFVKQKFTAFIINAVVVMTLGSVLLGINTDGDRPVGVSKAQYLTGFLTTLGAAALAGLMMPLIELGFSKAVRDLNYSSLLQFQFIFSSSSTIFCVIGMLVNKDFQVIPREANEFELGKAMYYILMVLTAITWQLLNVGIVGVISYASALFYGILTSVLVPFTGVAAVIFYHESFTGLKGMALALCLWGFCSYFYGEYKMMSKKVINNGNPETIEKDENEPKRLDDLGEP

SEQ ID NO: 476 - DNA, 1152 bp, Papaver somniferum
  source 1..1152: mol_type = other DNA
atggctacttctaccccattgaatatggaagctccagaaattttgggtacaacccaaaatggtaactctaagacccatgttgaaaagccaactaagactaagaactggctgatgatcattatcaactctgccttcgttaccattggtttggttggtggtccattattgattaggttgtactacttgcatggtggcaatagaaaatggttgacttcttgcttgcaatctgctggtttcccaattttgattttccctttgaccttcctgttcatccagtctaaattgtctactgagtctccatctttttggttggaacctaagttgtctttgtggtccgctattattggtatcttgttcggtctgatcaacttcatgtattcctctggtttgtcctatattccagtctctacttcctctttgttgttggctactcaattgtgtttcgttgctttcttctcttggttgttcgtcaagcaaaagttcaccgcctttattatcaacgccgttgttgttatgactttgggttctgttttgttgggtattaacaccgatggtgatagaccagttggtgtttctaaagctcaatacttgactggtttcttgactactttgggtgctgctgctttggctggtttgatgatgccattgattgaattgggtttctccaaggctgttagagacttgaattactcgtctttgttgcagttccagttcatcttctcttcatcctctactattttctgcgtcatcggtatgttggttaacaaggatttccaagtcattcctagagaagccaatgaattcgaactaggtaaagccatgtactacatcttgatggttttgactgctattacctggcagttgttgaatgttggtatcgttggtgttatttcctacgcttctgctttgttctacggtattttgacctctgttttggttccattcactggtgttgctgctgttattttctaccatgaatctttcaccggtttgaaaggtatggctttggctttgtgtttgtggggtttttgttcttacttttacggcgagtacaagatgatgtccaaaaaggttattaacaacggcaacccagaaaccattgaaaaggacgaaaatgaacctaagagattggatgatttgggtgagccataa

SEQ ID NO: 477 - protein, 372 aa, Trema orientale
MEMEMEMDQEDHDQSAKHNRSLLILNCILLTIGNCGGPLIMRLYFIHGGKRVWLSSWLETGGCFIIIIPLAAAYFRRRRRRRRLASARLVQMEPFLFLGSAVIGLATGFDDYLYAYGVARLPVSTSSLIIASQLAFTAGFAFLLVKQRFTSYSVNAVVLLTIGGAVLALHTRGDRPKGESEKDYVVGFLMTVAAAVLYGFILPLVELMYKKAKQRITYSLVLEIQFVMCFFATLFCTVGMLINKDFKAIPREARKFELGETTYYVVLVLSAIIWQGFFLGAIGVIFCASSLLSGIVIAVLLPVTEILAVIFYKENFQAEKGVSLALSLWGFVSYFYGEIKQSKKIKKERDNKQPTKSSSSTPAREMSHVASP

SEQ ID NO: 478 - DNA, 1119 bp, Trema orientale
  source 1..1119: mol_type = other DNA
atggaaatggagatggaaatggatcaagaagatcacgatcaatctgctaagcacaacagatccttgttgattttgaactgcatcttgttgaccattggtaattgtggtggtccattgattatgaggttgtactttattcacggtggtaagagagtttggttgtcatcttggttggaaactggtggttgcttcattattatcattccattggctgctgcttacttcagaagaagaaggcgtagaagaagattggcttctgctagattggttcaaatggaaccatttttgttcttgggttccgctgttattggtttggctactggttttgatgattacttgtatgcttacggtgttgccagattgccagtttctacttcctctttgattatcgcttctcaattggcttttactgctggttttgctttcttgttggtcaagcaaagattcacctcttactctgttaacgccgttgttttgttaactattggtggtgctgttttggccttgcatacaagaggtgatagaccaaaaggtgaatccgaaaaggattacgttgttggtttcttgatgactgttgctgctgctgtcttgtatggtttcattttgccattggtcgagctgatgtacaaaaaggctaagcaaagaattacctactccttggtcttggaaatccaattcgttatgtgtttcttcgctaccttgttctgtactgttggcatgttgattaacaaggacttcaaggctattccaagagaagctagaaagttcgaattgggtgaaactacctattacgtcgttttggttttgtccgccattatttggcaaggtttctttttgggtgctatcggtgttattttctgcgcttcttctttgttgtccggtatcgttattgctgttttattgccagtcaccgaaattttggctgttatcttctacaaagaaaacttccaagccgaaaagggtgtttctttggctttgtctttgtggggtttcgtttcttacttttacggtgaaatcaagcagtccaagaagattaagaaagagagagataacaagcagcccaccaaatcttcatcttctactccagctagagaaatgtctcatgttgcttctccatga

SEQ ID NO: 479 - protein, 363 aa, Cucumis sativus
MDKEQQQQNTPSVKRTLLIFNCCLLAVGNCGGPLIMRLYFVHGGKRVWLSSCLETGGWPIIFIPLLISYIHRRRLAALDPSGSPNSAQFIFMKPRLFLASAFIGILTGFDDYLYAYGVARLPVSTSALIIACQLAFTAGFAFLLVKQKFTSYSINAVVLLTIGGAVLALHTSGDRPAGESNKDYIAGFLMTVAAAVVYGFVLPLVELTYKKARQQITYTLVLEFQLIMSLFATIVCAIGMLINNDFQVIPREAEAFGLGKFRYYLVLVLSAILWQGFFLGAIGVIFSSSSLFSGIVIAVLLPVTEILAVIIFNERFQAEKGVSLALNLWGFLSYFYGEIKHNKRKKLELQRYEETTSTQVANV

SEQ ID NO: 480 - DNA, 1092 bp, Cucumis sativus
  source 1..1092: mol_type = other DNA
atggacaaagaacaacagcaacagaacaccccatctgttaagagaactttgttgattttcaactgctgcttgttggctgttggtaattgtggtggtccattgattatgaggttgtactttgttcatggtggtaagagagtttggttgtcctcttgtttggaaactggtggttggccaattatcttcattccactgttgatctcttacatccacagaagaagattggctgctttggatccatctggttctccaaattctgctcagttcatttttatgaagcccaggttgtttttggcctctgcttttattggtattttgaccggtttcgacgattacttgtatgcttatggtgttgctagattgccagtttctacttccgctttgattattgcttgtcaattggcttttactgctggtttcgctttcttgttggttaagcaaaagttcacctcctactccattaacgctgttgttttgttgactattggtggtgctgttttggcattgcatacttcaggtgatagacctgctggtgaatctaacaaagattacattgccggtttcttgatgactgttgctgctgcagttgtttacggttttgttttgccattggttgagttgacttacaagaaggccagacaacaaattacctacaccttggtcttggagttccaattgatcatgtctttgttcgctactatcgtttgcgctataggcatgttgattaacaacgatttccaagtcattccaagagaagctgaagcttttggtttaggtaagttcaggtactacttggtgttggttttgtctgctattttgtggcaaggttttttcttgggtgctatcggtgttatcttctcctcatcatctttgttctccggtatcgttattgcagttttgttgccagttaccgaaattttggccgttatcatcttcaacgaaagattccaagctgaaaagggtgtttctttggctttgaatttgtggggtttcctgtcttacttttacggtgaaatcaaacacaacaagcgtaagaagttggaattgcagagatacgaagaaaccacttctactcaagttgccaacgtttga

SEQ ID NO: 481 - protein, 373 aa, Helianthus annuus
MENQKETTITISKDTNTTPMTTEVSLFARKTLLILNCLLLSIGTCGGPLIMRLYFVHGGSRVWLSSVLQTAGFPFIIAVIIILYFCRSAVAKNQNNKTTKLFYMRPRLFLAAVFIGLITGLDNYLYAYGVARLPVSTSSLIIAFQLAFTAFFAYLVVKLKFTPYSVNAVVLLTVGAGVLALHASSDRPEGESKKEYTMGFVMTLMAALVYGFLLPLIELTYNKAQQEITYTLVLEIQMVLSLFATVFCVVGMIVNNDFQVIPREASKFEFGATKYYIILCASALIWQCYFLGAIGVIFCSSALLSGIIISVLLPVIEVLAVVFYKEKFQAEKGVSLVLSLWGFASYFYGEYKVTKKAKRCNTFSSTINGACLS

SEQ ID NO: 482 - DNA, 1122 bp, Helianthus annuus
  source 1..1122: mol_type = other DNA
atggaaaaccagaaagaaaccaccatcaccatttctaaggataccaacactactccaatgaccactgaagtttctttgttcgctagaaagaccctgttgattttgaactgcttgttgttgtctattggtacttgtggtggtccattgattatgaggttgtactttgttcatggtggttccagagtttggttatcttctgttttacaaactgctggcttcccattcattattgccgttattatcatcctgtatttctgcagatcagccgttgctaagaatcaaaacaacaagactaccaagctgttctatatgaggccaagattattcttagccgccgttttcattggtttgattactggtttggacaactacttgtatgcttacggtgttgctagattgccagtttctacttcctctttgattatcgctttccaattggctttcactgctttctttgcttacttggttgtcaagttgaagttcaccccatactctgttaatgccgttgttttgttgactgttggtgctggtgttttggctttacatgcttcttcagatagaccagaaggtgagtctaagaaagaatacactatgggtttcgtcatgactttgatggctgctttggtttacggttttttgttgccattgatcgagttgacttacaacaaggcccaacaagaaattacctacaccttggttttggaaatccagatggttttgtctttgtttgctaccgttttctgcgttgttggtatgatcgttaacaacgatttccaagtcattccaagagaagcctctaagtttgaatttggtgctaccaagtactatatcatcttgtgtgcttcagccttgatttggcaatgttactttttgggtgctatcggcgttattttctgttcttctgctttgttgtccggcatcatcatttctgttttgctgccagttattgaagttttggctgtcgtgttctacaaagaaaagttccaagctgaaaagggtgtctctttggttttatctttatggggtttcgcctcttacttttacggtgagtacaaggttactaagaaagccaagagatgtaacaccttctcctctactattaacggtgcttgtttgtcctga

SEQ ID NO: 483 - protein, 365 aa, Musa acuminata
MEVEGQNSNHQNQDAAPQMSKGLRRALIVLNCVLMALGNTGSPLLLRLYYRSGGKRQWLSSWLETAGWPFIFVPLLITYLHRRRRCQLRPGNCHPTKLFFITPRLFLACAFIGLITGFDDFLYAYGLSFLPVSTSSLLISTQLAFTAFFAFLIVKQKFTPYSINSVALLTVGAVVLGLHVSSDRPDNVTRGQYHLGFILTLGAAALYGLILPLVELMYSKSKQAITYTLVMEMQLVMGFFATAFCTVGMLVNKDFQAIPREARHFELGEFRYYVVLVWSAVFWQFFFLGTVGIIFCVNTLLAGILIALFIPVTEVLGVVFFKENFSSEKGIALVLSLWGLASYSYGEYRQEKDKKDKAAPSNQVA

SEQ ID NO: 484 - DNA, 1098 bp, Musa acuminata
  source 1..1098: mol_type = other DNA
atggaagtcgagggtcaaaactccaaccaccaaaatcaagatgctgctccacaaatgtctaaaggtttgagaagggctttgatcgttttgaactgtgttttgatggctttgggtaatactggttcacctttgttgttgaggttgtactatagatctggtggtaagagacaatggttgtcatcttggttggaaactgctggttggccattcatttttgttcctttgttgatcacctacttgcacagacgtagaagatgtcaactaagaccaggtaattgtcacccaactaagttgttctttattacgccaaggttgttcttggcttgtgctttcattggtttgattaccggtttcgatgatttcttgtatgcctacggtttgtctttcttgccagtttctacttcctccttgttgatttctactcaattggctttcactgctttcttcgctttcttgatcgttaagcaaaagttcaccccatactccattaactctgttgctttgttaactgttggtgctgttgttttgggtctgcatgtttcttcagatagaccagataatgttaccagaggtcaataccatttgggtttcattttgactttgggtgctgctgcattatatggtttgatattgccattggtcgagctgatgtactctaaatctaagcaagctattacctacaccttggtcatggaaatgcaattggttatgggttttttcgctaccgctttctgtactgttggtatgttggttaacaaggacttccaagctattccaagagaagctagacattttgaattgggtgaattcaggtactacgttgtcttggtttggtcagctgttttttggcaatttttcttcttgggtactgtcggtattatcttctgcgttaatactttgttggccggtattttgattgccttgttcattccagttaccgaagttttgggtgtcgttttcttcaaagagaacttctcatccgaaaagggtattgccttggttttgtctttgtggggtttagcttcttattcttacggtgagtacagacaagaaaaggataagaaagataaggctgctccatccaatcaagttgcttaa

SEQ ID NO: 485 - protein, 365 aa, Nelumbo nucifera
MARNIETIENGVLNEKTCYYTKIPDGDSSIKSNMAKWWLLGINCVCTVLGTIAGPLFLRLYFLHGGNRKWIPSWLQTAGVPVLLGPLTVLYLRERASGVRFLAPTKLLLLSAGIGILVGLNDFMYSHGLSFLPVSTSALLLSTQLGFTALFALLIAKQKFTPYSINAVVLMTLGAALLGLSKSGDRLLGVSNRDYWLGFVLTLGAAGLLGFILPCCEVAYATARKTITYSVVLQFQFGVNFFATVFCTIGMLINKDFQAIPREANAFELGAVKYYLVLVSIAIVWQMAGVGTLGVVFSTTSLFAGVLNATLLPLTETAAVIVYHEKFTGEKGMALALCSWGFISYFYGSYKEKKKQDALFETGSR

SEQ ID NO: 486 - DNA, 1098 bp, Nelumbo nucifera
  source 1..1098: mol_type = other DNA
atggccagaaacatcgaaaccatcgaaaacggtgttttgaacgaaaagacttgctactacaccaagattccagatggtgattcctccattaagtctaatatggctaaatggtggttgttgggtattaactgtgtctgtactgttttgggtactattgctggtcctttgtttttgaggttgtacttcttgcatggtggtaacagaaaatggattccatcttggttgcaaactgctggtgttccagttttgttgggtccattgactgtcttgtatttgagagaaagagcttctggcgttagatttttggctccaactaagttgttgttgctgtctgctggtattggtattttggttggtttgaacgacttcatgtactcccatggtttgtcttttttgccagtttctacttccgctttgttgttgtctactcaattgggttttactgctttgttcgccttgttgattgctaagcaaaagttcactccatactccattaacgccgttgttttgatgactttgggtgctgctttattgggtttgtctaaatccggtgatagactgttgggtgtttctaatagagattactggttgggtttcgttttgacattaggtgctgctggtttgttgggctttattttgccatgttgtgaagttgcttatgctactgctagaaagaccattacttactccgttgtcttgcaattccaattcggtgttaatttcttcgctaccgttttctgtaccatcggcatgttgattaacaaggatttccaagccattccaagagaagctaatgcttttgaattgggtgcagtcaagtactacttggtcttggtttctattgctatcgtttggcaaatggccggtgttggtactttaggtgttgttttttctaccacctctttgtttgctggtgtcttgaatgctactttgttgccattaactgaaaccgctgctgttatcgtttaccacgaaaagtttactggtgaaaaaggtatggctttggctttgtgttcttggggttttatctcttacttctacggctcctacaaagaaaagaaaaagcaagatgccttgttcgaaaccggttctagataa

SEQ ID NO: 487 - protein, 406 aa, Papaver somniferum
MDIELASTNAGSATNYNHGAGNHHSNLVVPNDSTGEDDLQKSINPITQKIVRNWKLILFCFFTAFGYIGGPMLQRLYFTQGGGRKWLSSMLQTVGFPVLVAPLSYIYMKKVNGPSYDSSWVFIMEPKLFMYSAILGVALGLDNYMYSAGLFYLPVSTSSLLFSTQLAFTAIFAFIIVRQKFTFCSFNSVVLMTLGAVVLALNTSSDTPPGTTQQQYYLGFFLTLAGAALAGLIMPLVELAYGKSSKPITYSVVMQFQFVLSLFATLVSIIGMAINKDFQVIQREGRNFGLGQVKYYLLLIAVAVAWQIASAGFLGIIYCTSSLFSGIFTTCLLPFTQVAASIAFHEKFTGQKGMSLALCLWGFASYFVGEHKKTKKPHPIVYDKEKSELTDNNDTKEGGKQYNVTQ

SEQ ID NO: 488 - DNA, 1221 bp, Papaver somniferum
  source 1..1221: mol_type = other DNA
atggacatcgaattggcttctaccaatgctggttctgctactaattacaatcatggtgctggtaaccatcactccaatttggttgttccaaatgattctactggtgaggatgacttgcaaaagtctattaacccaatcactcagaagatcgtcagaaactggaagttgattttgttctgtttcttcaccgccttcggttatattggtggtccaatgttgcaaaggttgtactttactcaaggtggtggtagaaaatggctgtcatctatgttacaaactgttggtttcccagttttggttgctccattgtcttatatctacatgaagaaggttaacggtccctcctatgattcttcttgggttttcattatggaacccaagctgtttatgtactccgctattttgggtgttgctttgggtttagataactacatgtattccgctggcttgttctatttgccagtttctacttcttccctgttgttctctactcaattggctttcactgctattttcgccttcattatcgtcagacaaaagttcaccttctgctcattcaactccgttgttttgatgactttgggtgctgttgttttggctttgaacacttcttctgatactccaccaggtactactcaacaacaatattacttgggtttcttcttgactttggctggtgctgctttagctggtttgattatgccattggttgaattggcatacggcaaatcttctaagccaattacctactctgttgtcatgcaattccaattcgtcttgtctttgttcgctaccttggtttccattattggtatggccattaacaaggacttccaggttattcaaagagagggtagaaatttcggtttgggtcaagttaagtactacctgttgttgattgctgttgcagttgcttggcaaattgcttctgctggttttttgggtattatctactgtacctcctctttgttctctggtattttcaccacttgtctgttgccattcactcaagttgctgcttctattgcttttcatgagaagttcactggtcaaaagggtatgtctttggctttatgtttgtggggttttgcctcttactttgttggtgaacacaaaaagactaagaagccacatccaatcgtctacgacaaagaaaagtctgaattgaccgataacaacgacacaaaagaaggtggtaagcagtacaacgttacccaatga

SEQ ID NO: 489 - protein, 383 aa, Papaver somniferum
MVTSAMDIEKLEILGTTHNGNSNTRIEKPKKTKNWLLVIINCAIVFVGAIGSPLLMRLYYLHGGSHIWLSSFIASAGFPILIIPLMFLFIRSRSSADKISSSFWMEHKLFLWGAILGVLYGLVTFMYALGLSYIPVSTSSLLMATQLCFIAFFSWLIVKQKFTAFIINAVVVMTLGSVLLGINTDGDRPVGVSKAQYLLGFVLTLSAAALAGLIMPLIELAFSKAIRNLSYSSLLQFQFVLSVFSATVCVIGMLANKDFQAIPREANDFGLGKANYYIIMVATAITWQLSGVGTMGVIFYASALFNGILSSVLIPLTGVAAVMFYHESFTSLKGMALALCLWGLCSYFYGEYKMMNKVMNNESTKRLDKVENEPKRLDDYEEP

SEQ ID NO: 490 - DNA, 1152 bp, Papaver somniferum
  source 1..1152: mol_type = other DNA
atggttacctccgccatggatatcgaaaagttggaaattttgggtactacccacaacggtaactctaacactagaattgagaagcccaaaaagaccaagaactggttgttggttattatcaactgcgccatcgttttcgttggtgctattggttctccattattgatgaggttgtactacttgcatggtggttcccatatttggctgtcatcttttattgcttcagctggtttcccaatcttgatcattccattgatgttcttgtttatcaggtccagatcttccgccgataagatttcttcttctttttggatggaacacaagttgtttttgtggggtgctattttgggtgtcttgtatggtttggttactttcatgtatgccttgggcttgtcctatattccagtttctacatcctctttgttgatggctactcagttgtgtttcattgctttcttctcttggttgatcgtcaagcaaaagttcaccgccttcattattaacgccgttgttgttatgactttgggctctgttttgttgggtattaacactgatggtgatagaccagttggtgtttctaaagctcaatacttgttgggtttcgtcttgactttgtctgctgctgctttggctggtttgattatgccattgattgaattggctttctccaaggccattaggaacttgtcttattcgtctttgttgcagttccagttcgtcttgtctgttttttctgctaccgtttgcgttattggtatgttggctaacaaggatttccaagccattcctagagaagctaatgatttcggtttgggtaaagccaactactacattattatggttgctaccgctatcacctggcaattgtctggtgttggtactatgggtgttattttctatgcttccgctttgttcaacggcatcttgtcatctgttttgattcctttgactggtgttgctgctgttatgttctaccatgaatctttcaccagcttgaaaggtatggctttggctttgtgtttatggggtttgtgttcttacttttacggcgagtacaagatgatgaacaaggtcatgaacaacgaatccactaagagattggataaggtcgaaaacgagccaaaaagattggatgattacgaggaaccataa

SEQ ID NO: 491 - protein, 389 aa, Papaver somniferum
MAISTLNIETLESLGTAQYGNSKTHTEKPTKTKNWLMIIINCAFATIGVVGGPLLVRLYYLHGGNRKWLTSFLQSAGFPILIVPLIFLFIQSKLLTRKNDQSSPFSYIEPKLFLSSAAIGVLFGVDNFMYSLGLSYLPVSTSTLLFATNLCFIAFFSWLIVKQKFTAFIINAVVVMTLGSVLLGINIDGDRPIGVSKSHYLLGFILTLVAAALAGLIMPLIELAFGKAIRNLTYSSLLQFQLVLSLFSTIVCGIGMLVNKDFQAIPREANEFELGKAKYYIIMVVTAIIWQFTAVGIVGVIFYTSALFNGIFGSVLVPFTGVAAIIFYHESFTGLKGMALALCLWGFCSYFYGEYKMRKKVINNETPETIDNVENEPRKSDDHEQPLIV

SEQ ID NO: 492 - DNA, 1170 bp, Papaver somniferum
  source 1..1170: mol_type = other DNA
atggccatctccaccttgaacattgaaaccttggaatctttgggtactgctcaatacggtaactctaagactcatactgaaaagccaactaagaccaagaactggctgatgattattatcaactgtgctttcgctaccatcggtgttgttggtggtccattattggttaggttgtattacttgcatggtggcaatagaaagtggttgacttctttcttgcaatctgctggtttcccaattttgatcgtcccattgattttcttgttcatccagtctaagctgctgaccagaaagaatgatcaatcttctccattctcctacatcgagccaaagttgtttttatcctctgctgctattggtgttttgttcggtgttgacaacttcatgtattccttgggtttgtcttacttgccagtttctacttctactttgttgttcgccactaacttgtgcttcattgcttttttctcttggttgatcgtcaagcaaaagttcaccgccttcattattaacgccgttgttgttatgactttgggctctgttttgttgggtattaacatcgatggtgatagaccaatcggtgtttctaagtctcattacttgttgggtttcatcttgactttggttgctgctgctttggctggtttgattatgccattgattgaattggctttcggtaaggccattagaaacttgacttactcctctttgttgcaattccagttggtcttgtctttgttctctactatcgtttgcggtatcggtatgttggttaacaaggattttcaagccattccaagagaagccaatgaattcgaactaggtaaagccaagtactacatcatcatggttgttaccgctatcatttggcaattcactgctgttggtatagtcggtgttattttctacacctctgctttgttcaacggtatctttggttctgttttggttccattcacaggtgttgctgccattatcttttaccatgaatctttcaccggtttgaaaggtatggctttggctttgtgtttgtggggtttttgttcttacttttacggcgagtacaagatgcgtaaaaaggtcattaacaacgaaaccccagaaaccatcgataacgttgaaaatgaacctagaaagtccgatgatcacgaacaaccattgatcgtttga

SEQ ID NO: 493 - protein, 359 aa, Jatropha curcas
MDENKEKPQPAKATMRRALLVLNCVILSIGNCGGPLIMRLYFIHGGKRVWLSSWLETAGWPIIFIPLLISYFHRRSTTDPTTAKLFYMKPSLFLAATGIGILTGFDDYLYAYGVARLPVSTSSLIIATQLAFTAGFAFLLVKQKFTSYSINAVVLLTVGAGVLALHTSSDRPEHESKKEYNLGFVMTLGAAVLYGLILPLVELTYRKAKQEISYTLVMEIQMIMCLFATVVCTVGMLVNNDFKVIPREAKEFELGETKYYVIMVWSAIIWQCFFLGAIGIVFCASSLASGVVIAVLLPVTEILAVIFYQEKFQAEKGVALALSLWGFLSYFYGEIKQSKKTNLTSEIETSESSIPTQNV

SEQ ID NO: 494 - DNA, 1080 bp, Jatropha curcas
  source 1..1080: mol_type = other DNA
atggacgagaacaaagaaaagccacaaccagctaaagctactatgagaagggctttgttggttttgaactgcgttattttgtccattggtaattgtggtggtccattgattatgaggttgtactttattcacggtggtaagagagtttggttgtcatcttggttggaaactgctggttggccaattatctttatccctttgttgatctcctacttccacagaagatctactactgatccaactactgctaagctgttttacatgaagccatccttgtttttggctgctactggtattggtattttgaccggttttgatgattacttgtacgcttatggtgttgccagattgccagtttctacttcctctttgattatcgctactcaattggcttttaccgctggttttgctttcttgttggttaagcaaaagttcacctcctactccattaacgctgttgttttgttgactgttggtgctggtgttttggcattgcatacttcatctgatagaccagaacacgagtctaagaaagagtacaatttgggtttcgttatgactttgggtgctgctgtcttgtatggtttgattttgccattagtcgagctgacttacagaaaggctaaacaagaaatctcctacaccttggtcatggaaatccaaatgattatgtgtttgttcgctaccgttgtctgtactgttggtatgttagttaacaacgacttcaaggtcattccaagggaagctaaagaatttgaattgggcgaaactaagtactacgttatcatggtttggtccgccattatttggcaatgttttttcttgggtgccatcggtatagttttctgtgcttcttctttggcttccggtgttgttattgctgttttgttaccagttaccgaaatcttggccgttatcttctaccaagaaaagttccaagctgaaaagggtgttgctttggctttgtctttatggggttttctgtcttacttttacggtgagatcaagcagtctaaaaagaccaacttgacctccgaaattgaaacctccgaatcttctattccaactcagaacgtttaa

SEQ ID NO: 495 - protein, 390 aa, Cucurbita pepo subsp. pepo
MSAPLPNFVHSQFLDHNSKMHSQPSESFVHNQTKHEQPNQSPDAAVKKFLLAFNCVLMSIGNCGGPLILRLYFIHGGNRVWLSSWLLTGGWPIILLPLVISYFQRRRTSAAGTTTEFIFIKPRLFFASAVIGLLTGLDNYLYAYGVARLPVSTSSLIIASQLAFTAGFAFLLVKQRFTSYSVNAVVLLTLGGAILALHSSGDRPAGESNREYIAGFLMTVGASVLYGFVLPLIELTYKKAKQNLTYTLVLETQFVISLFATILCTIGMLINNDFQAIPREGTEFGLGKTKYYVILALSTIIWQCFFLGAVGVIFYSSSLFSGVVIALLLPATEILAVIFFREKFQAEKGVSLALNLWGFVSYFYGEFKQSSKKKLQLPRAQGSAIQIPNV

SEQ ID NO: 496 - DNA, 1173 bp, Cucurbita pepo subsp. pepo
  source 1..1173: mol_type = other DNA
atgtctgctccattgccaaacttcgttcactctcaatttttggaccacaactccaagatgcattctcaaccatctgaatccttcgttcataaccagacaaaacacgaacagccaaatcaatctccagatgctgctgttaagaagttcttgttggctttcaactgcgtcttgatgtctattggtaattgtggtggtccattgatcttgaggttgtactttattcatggtggtaacagagtctggttgtcatcttggttgttgactggtggttggccaattatcttgttgccattggttatctcttacttccagagaagaagaacatctgctgctggtactactaccgaattcattttcattaagcccaggttgtttttcgcctctgctgttattggtttgttaaccggtttggacaattacttgtatgcttacggtgttgctagattgccagtttctacttcctctttgattatcgcttctcaattggcttttactgctggttttgctttcctgttggttaagcaaagattcacctcttactctgttaacgccgttgttttgttgactttaggtggtgctattttggccttgcattcttctggtgatagacctgctggtgaatctaatagagagtatattgctggtttcttgatgaccgttggtgcttctgtcttgtatggttttgttttgccattgatcgagctgacttacaagaaggctaagcaaaacttgacttacaccttggttttggaaacccaattcgtcatttctttgttcgctaccattttgtgcaccatcggtatgttgattaacaacgatttccaagccattccaagagaaggtactgaatttggtttgggtaagaccaagtactacgttatcttggctttgtccaccattatctggcaatgttttttcttgggtgctgtcggtgttatcttctactcttcatctttgttctccggtgttgttattgccttgttgttgccagctactgaaattttggccgtcattttcttcagagaaaagttccaagctgaaaagggtgtttctttggctttgaatttgtggggtttcgtgtcttacttttacggtgaattcaagcagtcctccaagaagaaattacaattgccaagagcacaaggttccgccattcaaattccaaacgtttag

SEQ ID NO: 497 - protein, 368 aa, Lactuca sativa
MEGREELASPIVATKVSPSAKKALLILNCILLSLGNCGGPLSMRLYFLHGGNRVWLSAFLETGGWPFILIVLLVLYFCRRCSTSPTSTTVVFMRPRLFFAAAVIGVLTGLDDFLYACGVSRLPVSTTSLIIASQLGFTAFFAFLLVKQKFTPYSINAVMLLTVGAAVLALHTSSDLPNGESRAEYLKGFFMTVAAAALYGLVLPMVEMTYNKAKQAITYTLVLEIQMVICLFATIVCTTGMIIDNDFKAIPREAKEYELGETKYYAVLCINAIFWQSFFLGAIGVVFCASSLLSGIIIAVLLPVTEVLAVVFYKEHFQAEKGIALVLSLWGFTSYFYGEYKVMKTKDIERESLHDRSVDLPQINYSSV

SEQ ID NO: 498 - DNA, 1107 bp, Lactuca sativa
  source 1..1107: mol_type = other DNA
atggaaggtagagaagaattggcctctccaatagttgctacaaaagtttctccatctgctaagaaggccttgttgattttgaactgcatcttgttgtctttgggtaattgtggtggtccattgtccatgaggttgtactttttacatggtggtaacagagtttggttgtccgcttttttggaaactggtggttggccattcattttgatagttttgttggtcctgtacttctgcagacgttgttctacttctccaacttctactaccgttgtttttatgaggccaaggttgttttttgctgctgctgttattggtgttttgaccggtttggatgatttcttgtatgcttgtggtgtttccagattgccagtttctactacgtctttgattatcgcttctcaattgggtttcactgctttctttgcctttttgctggttaagcaaaagttcaccccatactctattaacgccgttatgttgttgactgttggtgctgcagttttggcattgcatacttcatctgatttgccaaacggtgaatctagagctgaatacttgaagggtttcttcatgactgttgcagctgctgcattatatggtttggttttgccaatggttgagatgacttacaacaaagctaagcaagctattacctacaccttggtcttggaaatccaaatggttatttgtttgttcgccaccattgtctgtactaccggtatgattattgacaacgatttcaaggccattccaagggaagctaaagaatatgaattgggcgaaactaagtactacgctgttttgtgcattaacgccatcttttggcaatcttttttcttgggtgcaatcggtgttgttttctgtgcttcttctttgttgtccggtattatcattgccgttttgttgccagttactgaagttttggctgtcgtgttctacaaagaacatttccaagctgaaaagggtatcgccttggttttgtctttgtggggttttacttcttacttctacggtgagtacaaggtgatgaagactaaggatattgagagggaatccttgcacgatagatctgttgatttgcctcaaatcaactactcctccgtttga

SEQ ID NO: 499 - protein, 382 aa, Papaver somniferum
MENENTMKREALNSDSSHEQHHQQEKETKKKKLVLLIVNCILLSVGQVGGPMMLRLYYLHGGQRKWLSSWLQTSAFPILLIPLMVSWFKSKSKFHSQSQSTNVDHVNPGFLLTRKLFIWSVIVGIITGLDSFLFAVGYSYLPVSVASLLLATQLAFTAVFALILVKQKFTPYSINSVVLLTLGAVILAFHTSSDKPIGVSKSQYFLGFFMTLGGAALLGFMLPLIEFVYANACKVITYDLVMQMQFLVSLFATVFSTIGMLINKDFQAISREANEYGLGETKYYMVLVFTSILIQLSIVGYLGVIFYATSLFTGILVTLLIPVQQVFAIIFFHEKFSAEKGMSLALSIWGFASYFYGEYRQTKKKKNRDKVPISHKEIPSEV

SEQ ID NO: 500 - DNA, 1149 bp, Papaver somniferum
  source 1..1149: mol_type = other DNA
atggaaaacgagaacaccatgaagagagaagccttgaattctgattcctctcatgaacaacatcaccagcaagaaaaagagactaagaagaagaagctggtcttgttgatcgttaactgcatcttgttgtctgttggtcaagttggtggtccaatgatgttgagactatattacttgcatggtggtcagagaaagtggttatcttcttggttgcaaacttctgctttccccattttgttgatcccattgatggtttcatggttcaagtccaagtctaagttccactctcaatctcaatctaccaacgttgatcatgttaacccaggtttcttgttgaccagaaagttgttcatttggtccgttatcgttggtattatcaccggtttggattctttcttattcgccgttggttattcctacttgccagtttctgttgcttctttgttgttggctactcaattggcttttactgctgttttcgctttgatcttggtcaagcaaaagttcactccatactccatcaactccgttgttttgttgactttgggtgctgttattttggctttccatacctcttcagataagccaatcggtgtttctaagtcccaatactttttgggtttcttcatgactttaggtggtgctgctttgttgggttttatgttgccattgatcgaattcgtttacgctaacgcctgtaaggttattacctacgatttggtcatgcaaatgcagttcttggtttctttgttcgctactgttttctccaccattggcatgttgattaacaaggatttccaagccatttccagagaagctaatgaatatggtttgggcgaaacgaagtactacatggttttggttttcacctccatcttgatccaattgtctattgtcggttacttgggcgttattttctacgctacatctttgttcaccggtatcttggttaccttgttgattccagttcaacaagttttcgccatcatattcttccacgaaaagttctctgctgagaagggtatgtctttggctttgtctatttggggttttgcctcttacttttacggtgagtataggcagaccaaaaaaaagaagaatagagacaaggtccccatctctcacaaagaaattccatctgaagtctaa

SEQ ID NO: 501 - protein, 348 aa, Papaver somniferum
MGKYLLLFNCILLAVSSAGGPLLLRLYFIHGGKRLWLSSWLETAGWPILFLPLSLSYFLKRRRFKNGQDEKPSKFFMITPFLFMASAFIGLLVGLDDYLYTYGVSLLPVSTSALIMSTHLAFTAGFALFMVKQKFTSYSVNAVILLTVGAILLGLHSNGDTPVHESNRDYYLGFVMTIGASIIGGLLLPLVELMYKKSKQTITYSLVIELQIVISVFATLLCTVGMLVNNDFKVIQREGKEYELGETNYYVVLVASSITWQLCYLGTIGVIFCSTSLLAGVIGAVVLPVIEILAVIFYHESFKAEKGIALFLSLWGFISYFYLEIKESTKPKKKRSLELEQGDLTVSS

SEQ ID NO: 502 - DNA, 1047 bp, Papaver somniferum
  source 1..1047: mol_type = other DNA
atgggcaaatacctgctgttgttcaactgcattttgttggctgtttcttctgctggtggtcctttgttgttgaggttgtactttattcatggtggtaagaggttgtggttgtcatcttggttggaaactgctggttggccaattttgtttttgccattgtccttgtcctactttttgaagcgtagaagattcaagaacggtcaagacgaaaagccatctaagttcttcatgattacccctttcttgttcatggcttctgctttcattggtttgttggttggtttggatgattacttgtacacctacggtgtttctttgttgccagtttctacatccgctttgattatgtctactcatttggcttttaccgctggttttgctttgtttatggtcaagcaaaagttcacctcctactctgttaacgccgttattttgttaaccgttggtgctatcttgttgggcttgcattctaatggtgatactccagttcatgaatccaacagagattactacttgggtttcgttatgaccattggtgcctctattattggtggtttgttattgcctttggtcgagttgatgtacaagaagtctaagcaaaccatcacctactcattggtcatcgaattgcaaatcgtcatttctgttttcgctaccttgttgtgtactgttggtatgttggtcaacaacgatttcaaggtcattcagcgtgaaggtaaagaatacgaattgggtgaaactaactactacgttgttttggttgcctcttctattacctggcaattgtgttacttgggtactatcggtgttattttctgctctacctctttgttagctggtgttattggtgcagttgttttgccagttattgaaatcttggccgttatcttctaccacgaatcttttaaagccgaaaagggtattgccctgtttttgtctttgtggggtttcatctcttacttctacttggagatcaaagagtctaccaagccaaagaagaagaggtctttggaattggaacaaggtgatttgaccgtcagctcttaa

SEQ ID NO: 503 - protein, 383 aa, Nandina domestica
MSMNIDMNVEEGSAISKTHIQKQTTMTTQAKKPINLPLILLNCSLMTVGVLGGPLLLRLYYIHGGNRRWLTSCIQNAGFPILLFPLIYLYILHTKKTKLSNASFFMEPKLFVSSALIGVLFGLDNFMYALGLSYIPVSTSSLLFATQLAFLAVFSRLIVKQKFTAFSINAVVLMTLGSILLGIRNEGDRPLGVTKAEYLLGFLLTLGSAALVGFILPLIELSYSRATRTFNYSTVMQFQFNAAIFSTIFNLIGMLINKDFQAIPQEANEYKLGSTMYYFVLVAGAVIWQLSFIGGLGVILYTSSLFSGVFTAVLLPFTEVAAVIVYHESFTGEKGMALALCLWGFTNYFYGEYRKMKHMEITEPMKQDQVIITPHDDEQSCTV

SEQ ID NO: 504 - DNA, 1152 bp, Nandina domestica
  source 1..1152: mol_type = other DNA
atgtccatgaacatcgacatgaacgtcgaagaaggttctgctatttctaagacccatatccaaaagcaaactaccatgactactcaagctaagaagccaatcaacttgccattgattttgctgaactgttccttgatgaccgttggtgttttaggtggtcctttgttgttgaggttgtactatattcatggtggtaacagaagatggttgacctcttgtattcaaaatgctggtttccccattctgttgttcccattgatatacttgtacatcctgcacaccaaaaagaccaagttgtctaatgcttcattcttcatggaacccaagctgtttgtttcctctgctttgataggtgttttgttcggtttggacaatttcatgtatgccttgggtttgtcctatattccagtttctacttcctccttgttgttcgctactcaattggcttttttggccgttttctctagattgatcgtcaagcaaaagttcaccgccttttctattaacgccgttgttttgatgactctgggttctattttgttgggtatcagaaacgaaggtgatagaccattgggtgttactaaggctgaatacttgttgggtttcttgttgacattgggttctgctgctttggttggtttcattttgcctttgatcgagttgtcttactctagagctactagaaccttcaactactctaccgttatgcaattccaattcaacgctgctattttctccaccatcttcaacttgattggcatgttgattaacaaggacttccaagctattccacaagaagctaacgagtataagttgggttctacgatgtactacttcgttttggttgctggtgctgttatttggcaattgtcttttattggtggtctgggcgttatcttgtacacttcttctttgttttctggtgttttcaccgctgttttgttgccattcactgaagttgctgctgttatcgtttaccatgaatctttcactggtgaaaaaggtatggctttggctttgtgtttgtggggttttaccaattacttttacggcgagtacagaaagatgaagcacatggaaattaccgagccaatgaagcaagatcaagttattatcaccccacacgatgatgaacaatcttgtactgtttaa

SEQ ID NO: 505 - protein, 384 aa, Papaver bracteatum
MNIETLDILGPNQNGNSGTHTEQPIKTRNWLLIIINCALVFCGVIGGPLLMRLYYLHGGSRKWLSSFLQTAGFPVLIFPLIFLYIKSNSPTQNNDQSFSFFMEPKLFLWSAIVGIVFGVSNFMYALGLSYLPVSTSTILFATQLCFTAFFAWLIVKQEFTAFIINAVIVMTLGSVLLGINTNGDRPIGVSKAQYLIGFLMTLAAAALTGLGTPFIELAFFKATRNITYSTFLQFQITLGLFGTCLNVIGMLINKDFQAIPREADNFELGKGKYYMIICLTALTWQLSGIGLIGLIFYTNALFNGIYVSVLVPFTEVAAVIFYHEKFTGLKGMALALCLWGFSSYFYGEYKMMNKGGGNETQEKTKAVESEPKRLEDQEAPYSTV

SEQ ID NO: 506 - DNA, 1155 bp, Papaver bracteatum
  source 1..1155: mol_type = other DNA
atgaacatcgaaaccttggacatcttgggtccaaatcaaaatggtaactctggtactcataccgaacaacctattaagactagaaactggctgctgattattatcaactgcgctttggttttctgcggtgttattggtggtccattattgatgaggttgtactacttgcatggtggttctagaaaatggttgtcctctttcttgcaaactgctggttttccagttctgattttccctttgatcttcctgtacatcaagtccaattctccaactcaaaacaacgaccagtctttctcatttttcatggaacccaagttgttcttgtggtctgctatagttggtatcgttttcggtgtttccaatttcatgtatgccttgggtttgtcttacttgccagtttccacttccactattttgttcgctactcaattgtgtttcaccgctttttttgcttggttgatcgtcaagcaagaattcactgccttcattattaacgccgttatcgttatgactttgggctctgttttgttgggtattaacactaatggtgacagacctattggtgtttctaaggcccaatacttgattggtttcttgatgactttagctgctgctgctttgactggtttgggtactccttttattgaattggctttcttcaaggccaccagaaacattacttactccacattcttgcaattccagattaccttgggtctgtttggtacttgcttgaacgttattggcatgctgatcaacaaggatttccaagctattccaagagaagccgacaatttcgaattaggtaaaggcaagtactacatgatcatttgcttgacagctttgacttggcaattgtccggtattggtttaattggcttgatcttctacaccaacgctttgtttaatggcatctacgtttctgttttggtcccattcactgaagttgctgctgttattttctaccacgaaaagttcactggtttgaaaggtatggctttggctttgtgtttgtggggtttttcttcttacttttacggcgagtacaagatgatgaacaaaggtggtggtaacgaaactcaagaaaagactaaggctgttgaatccgaacctaagagattggaggatcaagaagctccatactctactgtttga

SEQ ID NO: 507 - protein, 360 aa, Cinnamomum micranthum f. kanehirae
MDIERAAAPSSSDVDNTKLPPKRNIKWWLVLINVVCIGVGTIGGPLLTRMYFLHGGSRKWLSSWLQTAGFPILLGPLIFLYKRHQARGIRFIAEPKLIAASAAVGVLIGLDNFMYSHGLSTLPVSTSSLLFSTQLAFTAFFALIIVRQKFTPYSINAVVLMTLGAVLLGMRKGGDRPAGVSNADYLLGFIITLGAAAVLGFLLPCIELIYAKASKVINYAVVMQFQLGVSFFATLFSTIGMIANKDFQAISREAKAFDIGEGKYYLVIVFVALTFQLVYIGSLGLVFCTSSLFTGVVTATLLPLTEIAAVIFFKEKFTGEKGMSLALCLWGFASYFYGTYRIEKKQKENIKTETPEAEVK

SEQ ID NO: 508 - DNA, 1083 bp, Cinnamomum micranthum f. kanehirae
  source 1..1083: mol_type = other DNA
atggacattgaaagagctgctgctccatcttcttcagatgttgataataccaaattgccacctaagaggaacattaagtggtggttggttttgattaacgttgtctgtattggtgtcggtactattggtggtccattattgactagaatgtacttcttgcatggtggttccagaaaatggttatcttcttggttgcaaactgctggtttcccaattttgttgggtccattgatctttctgtacaagagacatcaagctagaggcattagattcattgctgaacctaaattgattgctgcttctgctgctgttggtgttttgattggtttggataacttcatgtactcccatggtttgtctactttgccagtttctacttcctctttgttgttctctactcaattggctttcactgctttcttcgccttgattatcgttagacaaaagttcaccccatactccattaacgctgttgttttgatgactttgggtgccgttttgctaggtatgagaaaaggtggtgatagacctgctggtgtttctaatgctgattacttgttgggtttcatcattacattgggtgctgctgcagttttgggttttttgttgccatgtatcgaattgatctacgctaaggcttccaaggttattaactacgcagttgtcatgcaattccaattgggtgtttcttttttcgccaccttgttttctaccattggtatgattgctaacaaggacttccaagccatttctagagaagctaaggcctttgatattggtgaaggcaagtattacttggtcatcgttttcgttgctttgactttccagttggtttacatcggttctttgggtttagttttctgcacctcttctttgttcactggtgttgttactgctactttgttgcctttgactgaaattgctgccgtcattttcttcaaagaaaagtttactggtgagaagggtatgtctttggctttgtgtttgtggggttttgcttcttacttttacggcacctacagaatcgaaaagaagcagaaagaaaacatcaagactgaaaccccagaagccgaagttaagtaa

SEQ ID NO: 509 - protein, 394 aa, Papaver somniferum
MDIEAAASTNVGAAATNYNHGTGNHHNNLVVQNDREDDLPKTDNPITKKIVIDWKLILLCLLFAFGYIGGPILQRLYFTHGGGRKWFMSMLQCVGFPVLVAPLSYIYIKKVNGPSYDASWVFLMEPKLFIYSALLGVALGLDNYMYSAGLFYLPVSTSSLLFSTQLAFTAIFAFIIVRQKFTFYSFNSVVLMTLGSVVLALNTGSDKPPGTTQQQYYIGFALTIAGAALLGLVLPLVELSYGRSSKPITYSVVMQFQFVLSLFGTIATMIGMAINNDFQVIPREGRDFGLGQGKYYLLIVALAVVWQLFTIGFLGLIYCTSSLFAGIYTTCLLPFTQVAASIAFQEKFTSQKGMSLALCLWGFVSYFAGEYKKSKKPQPIAYDKDKSELSDNDA

SEQ ID NO: 510 - DNA, 1185 bp, Papaver somniferum
  source 1..1185: mol_type = other DNA
atggatattgaagctgctgcctctactaatgttggtgctgctgctactaattacaatcatggtactggtaaccaccacaacaacttggttgttcaaaacgatagagaagatgacttgccaaagactgataacccaattaccaagaagatcgttatcgactggaagttgattctgttgtgtttgttgtttgccttcggttatattggtggtccaatattgcaaaggttgtactttactcatggtggtggtagaaagtggttcatgtctatgttgcaatgtgttggtttcccagttttggttgctccattgtcttacatctacatcaagaaagttaacggtccatcttacgatgcctcttgggtttttttgatggaacctaagttgttcatctactccgctttgttgggtgttgctttgggtttagataactacatgtattccgctggcttgttctatttgccagtttctacttcttccctgttgttctctacacaattggctttcactgctattttcgccttcattatcgtcagacaaaagttcaccttctacagcttcaactccgttgttttgatgactttgggttcagttgttttggctttgaataccggttctgataagccaccaggtactactcaacaacaatattacattggtttcgccttgactattgctggtgcagctttgttaggtttggttttgccattggttgaactgtcttatggcagatcttctaagccaattacctactctgttgtcatgcaattccaattcgtcttgtctttgttcggtactattgccactatgattggtatggccattaacaacgatttccaagtcattccaagagagggtagagattttggtttaggtcaaggcaagtactacttgttgatagttgctttagctgttgtctggcagttgttcactattggttttttgggtttgatctactgcacctcttctttgtttgctggtatctacactacatgcttgttgccattcactcaagttgctgcttctattgctttccaagaaaagtttaccagccaaaagggtatgtcattggctttgtgtttatggggtttcgtttcttattttgccggtgagtacaagaagtctaaaaagccacaacctattgcctacgataaggacaaatctgaattgtctgataacgacgcctga

SEQ ID NO: 511 - protein, 375 aa, Papaver somniferum
MATSEMNLETLENLGATENCKSKLHTEPPTKHKNWLLTCINCAIVFCGVIGSPLLLRLYFLHGGDRKWLSSWIQTAGFPVLILPLIFLYIRSELFASRNNDHVSSFFMEQKLFLSSAAIGFLYGVVNFMYALGLSYIPVSTSSILCATQLCFSAFFAWLIVKQKFTAFIINAIVIMTLGSVLLGINSNGDRPVGVSKAQYLIGFVMTLGSAALSGLIMPMIEIAFSKATRSITYSSLLQFQITLAISANALNIIGVLINKDFQAIHREANEYELGKTKYYIILFFTAFTFQLMTMGVLGVILYTSALFNGIFTSVLIPFTQVAAVIFYHEKFTGLKGMALALCLWGFCSYFYGEYKMLQKVVDRETPEKYYKAKK

SEQ ID NO: 512 - DNA, 1128 bp, Papaver somniferum
  source 1..1128: mol_type = other DNA
atggccacctctgaaatgaacttggaaaccttggaaaatttgggtgctactgaaaactgcaagtctaagttgcatactgaaccaccaactaagcacaagaattggttgttgacctgtattaactgcgctatcgttttctgtggtgttattggttcacctttgttgttgaggttgtacttcttgcatggtggtgatagaaaatggttgtcctcttggattcaaactgctggttttccagttctgattttgcctttgatcttcctgtacatcagatccgaattattcgcctctagaaacaacgatcacgtgtcatcttttttcatggaacaaaaactgttcttgtcctccgctgctattggtttcttgtatggtgttgttaacttcatgtacgccttgggtttgtcctatattccagtttctacctcctctattttgtgcgctactcaattgtgtttctctgctttttttgcctggttgatcgtcaagcaaaagttcactgctttcattatcaacgccatcgttattatgaccttgggttctgttttgttgggcattaactctaacggtgatagaccagttggtgtttctaaagcccaatacttgattggtttcgtcatgactttaggttctgctgctttgtctggtttgattatgccaatgattgaaatcgctttctccaaggctactaggtctattacttactcctctttgttgcaattccaaatcaccttggctatttctgctaacgccttgaacattatcggtgtcttgattaacaaggacttccaagccattcatagagaagctaacgaatacgaattgggcaagaccaagtactacatcattttgtttttcaccgccttcaccttccaattgatgactatgggtgttttgggtgttatcttgtacacttctgctttgttcaacggtatcttcacctctgttttgatcccattcactcaagttgctgccgttatcttttaccacgaaaagtttactggtttgaaaggtatggctttggctttgtgtttgtggggtttctgttcttacttttacggtgagtacaagatgttgcaaaaggttgttgatagagaaacccctgagaagtattacaaggctaagaagtga

SEQ ID NO: 513 - protein, 356 aa, Rosa chinensis
METKQEPQANTSTTKRALLILNCILLSIGNCGGPLIMRLYFIHGGKRVWLSSWLETGGWPILLIPLFISYLHRRSTNPPTKLFYMKPRLFLAATFIGVLTGLDDYLYAYGVARLPVSTSSLIIATQLAFTAAFAFLLVKQKFTSFSINAVVLLTAGAGVLALHTSSDRPGHESTKQYALGFVMTLVAAALYGFILPLVELTYKKSKQEISYTLVMEIQMVMCLFATIFCTIGMLVNKDFNVIPREAREFGLGETKYYVILVWSAIIWQCFFLGAIGVIFCASSLLSGILIAVLLPVTEVLAVIFYQENFQAEKGVALALSLWGFVSYFYGEVKESKKKNLAPGSEMPRSSSPTENV

SEQ ID NO: 514 - DNA, 1071 bp, Rosa chinensis
  source 1..1071: mol_type = other DNA
atggaaacgaagcaagaaccacaagctaacacttctactactaagagagccttgttgatcttgaactgcatcttgttgtctattggtaattgtggtggtccattgatcatgaggttgtactttattcatggtggtaagagagtctggttgtcatcttggttggaaactggtggttggccaattttgttgattcctttgttcatctcctacctgcatagaagatctactaatccaccaacgaagctgttttacatgaagccaagattattcttagccgccactttcattggtgttttgactggtttggatgattacttgtatgcttacggtgttgctagattgccagtttctacttcctctttgattatcgctactcaattggcttttactgctgcttttgctttcttgttggtcaagcaaaagttcacctccttctctattaacgccgttgttttgttgactgctggtgctggtgttttagcattgcatacttcatctgatagaccaggtcatgaatctactaagcaatacgctttgggtttcgttatgactttggttgctgctgcattatacggtttcattttgccattggttgagctgacttacaagaagtccaaacaagaaatctcctacaccttggtcatggaaatccaaatggttatgtgtttgttcgccaccattttctgtaccattggtatgttggttaacaaggacttcaacgtcattccaagagaagctagagaatttggtttgggtgaaactaagtactacgttatcttggtttggtccgccattatttggcaatgttttttcttgggtgctatcggtgttattttctgcgcttcttctttgttgtccggtattttgattgcagttttgttgccagttaccgaagttttggctgttatcttctaccaagaaaacttccaagctgaaaagggtgttgctttggctttgtctttgtggggttttgtttcttacttttacggtgaggtcaaagagtccaagaagaaaaatttggctccaggttctgaaatgcccagatcttcttctccaactgaaaacgtttga

SEQ ID NO: 515 - protein, 358 aa, Erythranthe guttata
MEIQTTAAAMKRVLLIINCIILAVGNCGGPLIMRLYFVHGGKRIWFSSWLETGGWPILLVPLLVSYNRRRRTAASGKAELYLMKPRVFLAAAVIGVLTGFDDYLYAYGVAKLPVSTSALIIASQLAFTAAFAFLMVKQEFTAYSVNSVVLLTLGAVVLGLHTNGDRPEGESSKEYMVGFFLTVAAAALCGFILPAVELTYKKAKQAVSYTLVLEMQLVMCVFATSFCTLGMLVNNDFQAIAREARAYELGETKYYIVVLWSAIVWQCFFLGAIGVIFYSSSLLSGIVITVLLPATEILAIIFYHEKFQAEKGLSLFLSLWGFISYFYGEMKKDKNKNKNNIDQSNDQTQATETELTHR

SEQ ID NO: 516 - DNA, 1077 bp, Erythranthe guttata
  source 1..1077: mol_type = other DNA
atggaaattcaaactaccgctgctgccatgaagagagttttgttgattattaactgcatcatcttggccgttggtaattgtggtggtccattgattatgaggttgtactttgttcatggtggtaagagaatctggttctcttcttggttggaaactggtggttggccaattttgttggttccattattggtgtcctacaacagaagaagaaggactgctgcttctggtaaagctgaattatacttgatgaagcccagagtttttttggctgctgctgttataggtgttttgactggttttgatgattacttgtacgcttacggtgttgctaaattgccagtttctacttccgctttgattatcgcttctcaattggcttttacagctgcttttgctttcttgatggtcaagcaagaattcaccgcttactctgttaactccgttgttttgttaactttgggtgctgttgttttgggcttgcatacaaatggtgatagaccagaaggtgagtcatctaaagaatatatggtcggtttcttcttgactgttgctgctgcagctttgtgtggtttcattttgccagctgttgaattgacttacaagaaggctaaacaagccgtttcttacaccttggttttggaaatgcaattggtcatgtgtgttttcgctacttctttctgtactttgggtatgttggttaacaacgacttccaagctattgctagagaagctagagcttatgaattgggtgaaacgaagtactacattgtcgttttgtggtctgctatagtttggcaatgttttttcttgggtgccatcggtgttatcttctactcttcttctttattgtccggtatcgttatcaccgttttgttgccagctactgaaattttggccatcattttctaccacgaaaagttccaagctgagaagggtttgtctttgtttttgtcattgtggggcttcattagctacttctatggtgaaatgaagaaggataagaacaaaaacaagaacaacatcgaccagtccaacgatcaaactcaagctacagaaactgaattgacccacagatga

SEQ ID NO: 517 - protein, 377 aa, Arachis duranensis
MAEPVEAQQQQRKTTMKRTLLVTNCILLSVGTSGGPLIMRLYFLHGGHRVWLSSCLETAGFPIMLIPLILSYFRRKNNRHYPSETEKLKTTMVSMKPPLFFAAAFIGILTGLDDYLYACGVARLPVSTSALIIATQLAFTAVFAFLLVRQKFTPYSVNAVVLLTVGAGVLALHTRSDRPTGESTVEYVKGFVMTLMAAALYGFVLPLVELTYKKAKQNLTYSLVMEIQFVMCFFATVFCVAGMIINNDFKVIPREAREFGLGRGNYYVVMVASAIMWQAFFLGAIGVIFCSSSLLSGILIAILLPVTGILAVIFYKEKFQVEKAVSLVLSLWGFVSYFYGEIKQANKEKMTMMDSKNSVPETEQIQTLAVSHSPNNI

SEQ ID NO: 518 - DNA, 1134 bp, Arachis duranensis
  source 1..1134: mol_type = other DNA
atggccgaaccagttgaagctcaacaacaacaaagaaagactaccatgaagagaaccttgttggttaccaactgcatcttgttgtctgttggtacttctggtggtccattgattatgaggttgtatttcttgcatggtggtcacagagtttggttgtcatcttgtttggaaactgctggtttcccaattatgttgatcccattgatcctgtcctacttcagaagaaagaacaacagacattacccatccgaaaccgaaaagttgaaaaccactatggtttctatgaagccacctttgttttttgctgctgccttcattggtattttgaccggtttggatgattacttgtatgcttgtggtgttgctagattgccagtttctacttccgctttgattattgctactcaattggctttcactgccgtttttgcttttttgttggtcagacaaaagttcaccccatactctgttaatgccgttgttttgttaactgttggtgctggtgttttggcattgcatacaagatctgatagaccaactggtgaatctactgttgaatacgttaagggtttcgtcatgactttgatggctgctgcattatacggttttgttttgccattggttgagctgacttacaagaaggctaagcaaaacttgacctactccttggttatggaaatccaattcgttatgtgtttcttcgctaccgttttttgtgttgccggtatgattatcaacaacgacttcaaggttattccaagggaagctagagaattcggtttaggtagaggtaactactacgttgttatggttgcttctgctattatgtggcaagcttttttcttgggtgctatcggtgttatcttctgctcatcttctttgctgtctggtatcttgattgccattttgttgccagttacaggtattttggccgtcatcttctacaaagaaaagttccaagtcgaaaaggccgtttccttggttttgtctttgtggggtttcgtttcttacttctacggtgaaatcaagcaggccaacaaagaaaagatgactatgatggactccaagaactctgttccagaaaccgaacaaattcaaaccttggctgtttctcattccccaaacaacatttga

SEQ ID NO: 519 - protein, 382 aa, Papaver somniferum
MENESTMKRVVLNNDSSHEQHHQQEKETKKKKLVLLIVNCILLSVGQVGGPMMLRLYYLHGGQRKWLSSWLQTSAFPILLIPLMVSWFKSKSKFHSQSQSTNIDHVNPGFLLTRKLFIWSVIVGIITGLDSFLFAVGYSYLPVSVASLLLATQLAFTAVFALVLVKQKFTPYSINSVVLLTLGAVILAFHTSSDKPIGVSKAQYFLGFFMTLGGAALLGFMLPLIEFVYANACKVITYDLVMQMQFLVSLFATVFSTIGMIINKDFQAISREANEYGLGETKYYMVLVFTSILIQLSIVGYLGVIFYATSLFTGILVTLLIPIQQIFAIIFFHEKFSAEKGMSLALSVWGFASYFYGEYRQTKKKKNLDKVPISHKKIPSEV

SEQ ID NO: 520 - DNA, 1149 bp, Papaver somniferum
  source 1..1149: mol_type = other DNA
atggaaaacgagtccaccatgaagagggttgttttgaacaatgattcctctcatgaacaacaccaccagcaagaaaaagagactaagaagaagaagctggtcttgttgatcgttaactgcatcttgttgtctgttggtcaagttggtggtccaatgatgttgagactatattacttgcatggtggtcagagaaagtggttatcttcttggttgcaaacttctgctttccccattttgttgatcccattgatggtttcatggttcaagtccaagtctaagttccactctcaatctcaatccaccaacatcgatcatgttaatccaggtttcttgttgacccgtaagttgttcatttggtctgttatcgttggtatcatcaccggtttggattcttttttgtttgccgttggttactcctacttgccagtttctgttgcttctttgttgttggctactcaattggcttttactgctgttttcgctttggttttggtcaagcaaaagttcactccatactccatcaactccgttgttttgttgactttgggtgctgttattttggctttccatacctcttcagataagccaatcggtgtttctaaggctcaatactttttgggtttcttcatgactttaggtggtgctgctttgttgggttttatgttgccattgatcgaattcgtttacgctaacgcctgtaaggttattacctacgatttggtgatgcaaatgcagttcttggtttctttgttcgctactgttttctccaccattggtatgatcatcaacaaggatttccaagccatttccagagaagctaatgaatatggtttgggcgaaacgaagtactacatggtcttggttttcacctccatcttgatccaattgtctattgtcggttacttgggcgttattttctacgctacatctttgttcaccggtatcttggtcactttgttgattccaatccaacaaatcttcgccatcatattcttccacgaaaagttctctgctgagaagggtatgtctttggctttgtctgtttggggttttgcttcttacttttacggtgagtacaggcagaccaaaaaaaagaagaacttggataaggtccccatctctcataagaagattccatctgaagtctaa

SEQ ID NO: 521 - protein, 348 aa, Papaver alpinum
MNTYLLLFNGILLAVSSIAGPLLLRLYFIHGGKRIWLSSCLETAGFPVLIFPLWLSYFLRRRGFIKGDDDEKPKKLFTITLPLFIASAVIGLVTGLDDYLYTYGVSLLPISTATIIMSTHLAFTAGFALVMVKQKFTSFSVNAVVLLTIGAILLGLHGNGDKPVNESKKDYYLGFLITIAASVFNGLMLPMVELMYMKSKQTITYSLVIELQMVISGFATLFCTIGMIANNDFKVIPREGREYGLGEINYYIVLVASAITWQMYFVGTVGVIFCSTSLHAGVISVVVLPLTEILSVVFYHESFKAEKGIALFLSLWGFISYFYLEIKASRKPKKQCSELEQGGLTVSS

SEQ ID NO: 522 - DNA, 1047 bp, Papaver alpinum
  source 1..1047: mol_type = other DNA
atgaacacctacctgttgttgttcaacggtattttgttggccgtttcttctattgctggtcctttgttgttgaggttgtactttattcatggtggtaagaggatctggttgtcctcttgtttggaaactgctggttttccagttctgatttttccattgtggctgtcctactttttgagaagaagaggtttcatcaagggtgatgatgacgaaaagccaaagaagttgttcactattaccctgcctttgttcattgcttctgctgttattggtttggttaccggtttggatgattacttgtatacctacggtgtttccttgttgccaatttctactgccaccattattatgtctacccatttggctttcacagctggttttgctttggttatggttaagcaaaagttcacctccttctctgttaacgctgttgttttgttgaccattggtgctatcttgttgggtttacatggtaatggtgataagccagtcaacgaatctaagaaggattactacttgggtttcctgattactattgctgcctctgtttttaacggtttgatgttgcctatggtcgagttgatgtacatgaagtctaagcaaaccatcacctactcattggtcatcgaattgcaaatggttatttctggtttcgctaccttgttctgtaccattggtatgattgctaacaacgacttcaaggtcattccaagagaaggtagagaatatggtttgggtgaaatcaactactatatcgttttggttgcctctgctattacctggcaaatgtactttgttggtactgttggtgttatcttctgctctacttctttacatgccggtgtcatttccgttgttgttttaccattgaccgaaatcttgtccgtcgttttctaccatgaatctttcaaagccgaaaagggtattgccttgtttttgtctttgtggggtttcatctcttacttctacttggaaatcaaggcctctagaaagcctaaaaagcaatgctctgaacttgaacaaggtggtttgactgtttcctcttga

SEQ ID NO: 523 - protein, 377 aa, Eschscholzia californica
MASSMNIETNMNQETNHTEKPNKTLVQEQPTPKNWPIIIINSVITGIGAIGGPLLMRLYYLHGGNRRWLSSCVQTAGFPILIIPLTFLYFQHHSKQNPKNHLSSTSFWMEPKLFISSAVIGTLFGLDNFMYALGLSYIPISTSSLLFATQLAFVAFFAWFIVKQKFTPYSINSVILMTLGSILLGVDNDGDRPMGVTKAQYLLGFLLTLGSAALIGFMLPLVELCYSKATRTLSYSTVLQFQITLALFSTIFNAIGMLANKDFQAIPREAREFGLGETMYYVVLVAGAIVWQLSFIGGLGVILYTSSLFSGILTSVLLPFTEVAAVIVYHESFTGQKGMSLALCLWGFSSYFYGEYKMSKDSNPIISEKEDDLPCLV

SEQ ID NO: 524 - DNA, 1134 bp, Eschscholzia californica
  source 1..1134: mol_type = other DNA
atggcctcctccatgaacatcgagactaacatgaatcaagaaactaaccacaccgagaagccaaacaaaactttggttcaagaacaacccactccaaagaactggccaattatcattatcaactccgttattaccggtattggtgctattggtggtccattattgatgaggttgtattacttgcatggtggtaacagaagatggttgtcatcttgtgttcaaactgctggtttcccaattttgattatccctttgaccttcttgtacttccaacaccattctaagcaaaacccaaagaaccacttgtcctctacatctttttggatggaacctaagctgttcatttcctctgctgttattggtactttgttcggtttggacaatttcatgtacgcattgggtttgagctatatcccaatttctacctcctctttgttgttcgctactcaattggcttttgttgctttcttcgcttggtttatcgtcaagcaaaagttcactccatactccattaactccgtcattttgatgaccttgggttccattttgttgggtgttgataacgatggtgatagaccaatgggtgttactaaggctcaatacttgttgggtttcttgttgactttaggttccgctgctttgattggttttatgttgccattggttgagctgtgttactctaaagctactagaaccttgtcttactctaccgtcttgcaattccaaattaccttggctttgttctccaccattttcaacgctattggtatgttggctaacaaggatttccaagccattccaagagaagctagagaatttggtttgggtgaaaccatgtactacgttgttttggttgctggtgctatagtttggcaattgtctttcattggtggtttgggcgttatcttgtacacttcttctttgttttccggcatcttgacctctgttttgttgccttttactgaagttgctgccgttatcgtttaccatgaatcttttactggtcaaaagggtatgtctttggcattgtgtttgtggggtttttcctcttacttttacggtgagtacaagatgtccaaggattctaacccaatcatctccgaaaaagaagatgatttgccttgcttggtctaa

SEQ ID NO: 525 - protein, 371 aa, Macleaya cordata
MAMSIERIEEGALEQNNHHNKLSDGDYEEDSKKSLMAKWGLLLLNCTCSAVGTIGGPLLLRLYFLHGGSRKWLSSWLQTAGFPILLIPLLVLYFRDRSLGVKFFASPKLLLSSAVIGVLLGLDNFMYSYGLSFLPVSTSSLLISTQLIFTALFAFIMVRQKFTPYSINSVVLMTLGSILLGLRKSGDRPPGVSTSQYLLGFILSIGAAALGGFVLPCTEVAYAKASKAMTYSLVLQYQFCMTFFATVFCTVGMLVNKDFSAMQREASEYELGATKYYLVLVSSAVVWQLMFVGTLGIIFCTSSLFAGVITATLLPLTEIAAVIVFHEKFTGEKGMALALGIWGFISYFYGSYRENKKNIQSPHETNNTSSK

SEQ ID NO: 526 - DNA, 1116 bp, Macleaya cordata
  source 1..1116: mol_type = other DNA
atggccatgtccatcgaaagaattgaagaaggtgctttggaacaaaacaaccaccataacaaattgtccgatggtgactacgaagaggactctaaaaaatctttgatggctaagtggggcctgttgttgttgaactgtacttgttctgctgttggtactattggtggtcctttgttgttaaggttgtacttcttgcatggtggttccagaaaatggttatcttcttggttgcaaactgctggtttcccaattttgttgatcccattattggtcttgtacttcagagacagatctttgggtgttaagtttttcgcttctcccaagttgttgttatcctctgctgttatcggtgtcttgttgggtttagataacttcatgtactcctacggcttgtcttttttgccagtttctacttcctccttgttgatctctacccaattgattttcactgctttgttcgccttcatcatggtcagacaaaagtttactccatactccatcaactccgttgttttgatgactttgggttccatcttgctgggtttgagaaaatctggtgatagaccaccaggtgtttctacatctcaatacttgttaggcttcatcttgtctattggtgctgctgctttaggtggttttgttttgccatgtactgaagttgcttacgctaaagcttctaaggctatgacttattccttggtcttgcaataccagttctgtatgactttcttcgctactgttttctgtaccgttggtatgttggttaacaaggatttctctgctatgcaaagggaagcttctgaatatgaattgggtgctactaagtactacctggtcttggtttcttcagctgttgtttggcaattgatgttcgttggtactctgggtattatcttctgtacctcttctttgtttgccggtgttattactgctactttgttgccattgacagaaattgctgccgttatcgtttttcacgaaaagttcactggtgaaaaaggtatggctttggctttaggtatttggggtttcatctcttacttctacggttcctacagagagaacaagaagaacattcaatctccacacgaaacgaacaacacctcttctaagtaa

SEQ ID NO: 527 - protein, 364 aa, Cinnamomum micranthum f. kanehirae
MSLDIERAEETQFPTSTNVDNTKLEDATPPKRKINWLLIAMNVTCVGLGTIGGPLMVRLYFLHGGSKRWLSSWLQTAGFPILLGPLSFLYMKHRARGQRFFAEPKLMIASAVIGVIIGLDNFMYSHGLSVLPVSTSSLLFSTQLAFTAFFALIIVRQRFTPYSVNAVVLMTLGSVLLGLRKGGDRPANVSNGEYMVGFIITIGAAALIGFVLPCVELAYAKASKAITYPVVLQFQLGVTFFATVFSTIGMIAHKDFSAISREAKAYTIGEAKYYLVIVWGAILFQLVYIGSLGLVFCTSSLFTGVVTATLLPLTEIAAVIFFKEKFTGEKGMSLALCLWGFMSYFYGAYIMERKQRKAQEEEPK

SEQ ID NO: 528 - DNA, 1095 bp, Cinnamomum micranthum f. kanehirae
  source 1..1095: mol_type = other DNA
atgtccttggatatcgaaagagccgaagaaactcaattcccaacttctaccaatgttgacaacaccaaattggaagatgctactccaccaaagagaaagattaactggttgttgattgccatgaacgttacctgtgttggtttgggtactattggtggtccattgatggttaggttgtatttcttgcatggtggttccaaaagatggttgtcatcttggttgcaaactgctggttttccaattttgttgggtccattgtctttcttgtacatgaagcacagagctagaggtcaaagattttttgctgaacccaagttgatgattgcctctgctgttattggtgttattatcggtttggacaatttcatgtactcccacggtttgtctgttttgccagtttctacttcttccttgttgttctctactcaattggctttcactgctttcttcgccttgattatagtcagacaaagattcaccccatactccgttaatgctgttgttttgatgactttgggttctgtcttgttgggtttgagaaaaggtggtgatagaccagctaatgtttctaatggtgagtacatggttggtttcattattaccattggtgctgctgctttgatcggttttgttttaccatgtgttgaattggcttacgctaaagcttctaaggctattacttatccagtcgtcttgcaatttcaattgggtgttacttttttcgccaccgttttctctactatcggtatgattgctcacaaggatttctccgctatttctagagaagctaaggcttacacaattggtgaagctaagtactacttggttatagtttggggtgccatcttgttccaattggtttacattggttccttgggtttagttttctgcacctcttctttgttcactggtgttgttactgctactttgttgccattgactgaaattgctgccgtcattttcttcaaagaaaagttcacaggtgagaagggtatgtctttggctttgtgtttgtggggttttatgtcttacttttacggtgcctacatcatggaaagaaagcaaagaaaggctcaagaagaggaacctaagtag

SEQ ID NO: 529 - protein, 394 aa, Papaver somniferum
MDIEAAASTIVGAAATNYNHGTGNHHNNLAVQNDHEDDLPKTGNPVTKKIVIDWKLILFCLLFAFGYIGGPMLQRLYFTHGGGRKWFMSMLQCVGFPVLVAPLSYIYIKKVNGPSYDASWVFLMEPKLFMYSALLGVALGLDNYMYSAGLFYLPVSTSSLLFSTQLAFTAIFAFIIVRQKFTFYSFNSVVLMTLGSVVLALNTGSDKPPGTTQQQYYLGFALTIAGAALLGLVLPLVELSYGRSSKPITYSVVMQFQFVLSLFGTIATMIGMAINNDFQVIPREGRDFGLGQGKYYLLIVALAVVWQLFTIGFLGLIYCTSSLFAGIYTTCLLPFTQVAASIAFQEKFTSQKGMSLALCLWGFVSYFAGEYKKSKKPHPIAYDKEKSELSDNDA

SEQ ID NO: 530 - DNA, 1185 bp, Papaver somniferum
  source 1..1185: mol_type = other DNA
atggatattgaagctgctgcctctactatagttggtgctgctgctactaattacaatcatggtactggtaaccaccataacaacttggctgttcaaaacgatcacgaagatgatttgccaaagactggtaatccagttaccaagaagatcgttatcgattggaagttgatcctgttctgtttgttgtttgccttcggttatattggtggtccaatgttgcaaaggttgtactttactcatggtggtggtagaaagtggttcatgtctatgttgcaatgtgttggtttcccagttttggttgctccattgtcttacatctacatcaagaaagttaacggtccatcttacgatgcctcttgggtttttttgatggaacctaagttgttcatgtactccgctttgttgggtgttgctttgggtttagataactacatgtattccgctggcttgttctatttgccagtttctacttcttccctgttgttctctactcaattggctttcactgctattttcgccttcattatcgtcagacaaaagttcaccttctacagcttcaactccgttgttttgatgactttgggttctgttgttttggctttgaataccggttctgataagccaccaggtactactcaacaacaatattacttgggtttcgctttgactattgctggtgcagctttgttaggtttggttttgccattggttgaactgtcttatggcagatcttctaagccaattacctactctgttgtcatgcaattccaattcgtcttgtctttgttcggtactattgccactatgattggtatggccattaacaacgatttccaagtcattccaagagagggtagagattttggtttaggtcaaggcaagtactacttgttgatagttgctttagctgttgtctggcagttgttcactattggttttttgggtttgatctactgcacctcttctttgtttgctggtatctacactacatgcttgttgccattcactcaagttgctgcttctattgctttccaagaaaagtttaccagccaaaagggtatgtcattggctttgtgtttgtggggttttgtttcttattttgccggtgagtacaagaagtctaaaaagccacatccaattgcctacgacaaagaaaagtctgaattgtctgataacgacgcctga

SEQ ID NO: 531 - protein, 383 aa, Papaver somniferum
MATSEMNLETLDNLGTIENCKSKPTKHKNWLLICINCAIVFCGVIGSPLLLRLYFLHGGNRKWLSSWIQTAGFPVLILPLIFLYIRSELLATRNNDHVSPFLMEPRLFLSSAAIGFLYGVVNFMYALGLSYIPVSTSSILCATQLCFSAFFAWLIVKQKFTAFIINAIVIMTLGSVLLGINSDGDRPVGVSKSQYLIGFLMTLGSAALSGLIMPLIELAFSKATRSITYSTLLQFQITLAISANALNIIGMLINKDFQAIHREANEYELGKTKYYIILFFTAFTFQLMTMGVLGVILCTSALFNGIFTSALIPFTQVAAVIFYHEQFTGLKGMTLALCLWGFCSYFYGEYKMLHKVVNREAPEKNYEVKRPCTTWGKNCIDEA

SEQ ID NO: 532 - DNA, 1152 bp, Papaver somniferum
  source 1..1152: mol_type = other DNA
atggccacctctgaaatgaacttggaaaccttggataacttgggcaccattgaaaattgcaagtccaaacctaccaagcacaagaattggttgttgatctgtattaactgcgccatcgttttctgtggtgttattggttcacctttgttgttgaggttgtacttcttgcatggtggtaacagaaaatggttgtcctcttggattcaaactgctggttttccagttctgattttgcctttgatcttcctgtacatcagatccgaattattggctaccagaaacaacgatcatgtctctccatttttgatggaacccaggttgtttttatcctctgctgctattggtttcttgtacggtgttgttaatttcatgtacgccttgggtttgtcctatattccagtttctacctcctctattttgtgcgctactcaattgtgtttctctgctttttttgcctggttgatcgtcaagcaaaagttcactgctttcattattaacgccatcgtcattatgaccttgggttctgttttgttgggtatcaattctgatggtgatagaccagttggtgtctctaaatcccaatacttgatcggtttcttgatgactttaggttctgctgctttgtccggtttgataatgccattgattgaattggctttctctaaggccactagatccattacttactctaccttgttgcaattccaaatcaccttggctatttctgctaacgccttgaacattatcggcatgttgattaacaaggacttccaagccattcatagagaagctaacgaatacgaattgggcaagaccaagtactacatcattttgtttttcaccgccttcaccttccaattgatgactatgggtgttttgggtgttatcttgtgtacttctgctttgttcaacggtattttcacctctgctttgatcccattcactcaagttgctgctgttatcttttaccacgaacaattcactggtttgaagggtatgactttggctttgtgtttgtggggtttttgctcttacttttacggtgagtacaagatgttgcacaaggttgttaacagagaagctccagaaaagaactacgaagtcaaaagaccatgtaccacttggggtaagaactgtattgatgaagcttaa

SEQ ID NO: 533 - protein, 355 aa, Manihot esculenta
METNDKPQVNNTKRRALLILNCILLTVGNCGGPLILRLYFIHGGKRVWLSSWLQTGGWPIIFILLLISYLHRRSHKPTTKFFYMDTSLFIAATIVGVITGFDDYLYAYGIARLPVSTSSLIIATQLAFTAGFAFLLVKQKFNFYSINAVILLTVGAGVLALHSNSDRPEHESKGEYILGFVTTLAAAAIYGLILPLVELIYKKSKQEISYTLVMEIQLVMSLFATVVCTVGMLVNKDFEAIPGEARGFGLGETKYYVIIVCTAIILQCFFLGAIGVIFYSSSLVSAIIIAVLLPVTEILAVIFYQEKFQAEKGVALALSLWGFISYFYGEVKQTKKKDLATETEMSQTSNPTQNV

SEQ ID NO: 534 - DNA, 1068 bp, Manihot esculenta
  source 1..1068: mol_type = other DNA
atggaaacgaacgataagccacaagtcaacaataccaaaagaagggccttgttgattctgaactgtatcttgttgactgttggtaattgtggtggtccattgattttgaggttgtactttattcacggtggtaagagagtttggttgtcatcttggttgcaaactggtggttggccaattatcttcatcttgttgttgatcagctacttgcacagaagatctcataagccaactaccaagttcttctacatggacacgtctttgtttattgctgctactatcgttggtgttatcaccggttttgatgattacttgtacgcttacggtattgccagattgccagtttctacttcctcattgattatcgctactcaattggcttttactgctggttttgctttcttgttggtcaagcaaaagttcaacttctactccattaacgccgtcattttgttaacagttggtgctggtgttttggccttgcattctaattctgatagaccagaacatgagtctaagggtgagtacattttgggtttcgttactactttggctgctgctgctatctatggtttgattttgccattggtcgagctgatctacaagaagtctaaacaagaaatctcctacaccttggtcatggaaatccaattggttatgtctttgttcgctactgttgtctgtacagttggtatgttggttaacaaggatttcgaagctattccaggtgaagctagaggttttggtttgggtgaaactaagtactacgttattattgtctgcaccgccattatcttgcagtgttttttcttgggtgctatcggtgttatcttctactcttcttctttggtttccgccatcattattgctgttttgttgccagttaccgaaatcttggctgtcattttctaccaagaaaagttccaagctgaaaagggtgttgctttggctttgtctttgtggggttttatctcttacttttacggtgaagttaagcagaccaagaagaaggatttggctactgaaactgaaatgtcccaaacttctaacccaactcaaaacgtctga

SEQ ID NO: 535 - protein, 355 aa, Handroanthus impetiginosus
MAVENTSPAMQRTFLIINCIILAVGNCGGPLIMRLYFIHGGQRIWFSSWLETGGWPIILIPLLFSYTRRRSTTANAKPILMKPRVFFAAAVIGTVTGLDDYLYAYGVAKLPVSTSALIIATQLAFTAAFAFVLVKQKFTAYSINAVVLLTVGAVVLGLHTNGDRPAGESNKEYWLGFCLTVAAAALYGFILPLIELMYKKARQELTYSLIMEIQLVMCFFATVFCTVGMIINNDFQAISREAKEYELGETKYYLVVVWSAIIWQCFFLGAIGVIFYSSSLLSAIIITVLLPVIEILAVIFYHEKFQVEKGISLFLSLWGFISYFLGEIKHNKKNKDNLNEDQPSEVQLAHQNSVP

SEQ ID NO: 536 - DNA, 1068 bp, Handroanthus impetiginosus
  source 1..1068: mol_type = other DNA
atggccgttgaaaacacttctccagctatgcaaagaaccttcttgattatcaactgcatcattttggctgttggtaattgtggtggtccattgatcatgaggttgtactttattcatggtggtcagagaatctggttctcttcttggttggaaactggtggttggccaattatcttgattcctttgttgttctcctacaccagaagaagatctactactgctaatgccaagccaattttgatgaagccaagagtttttttcgctgctgctgttattggtactgttactggtttggatgattacttgtatgcttacggtgttgctaagttgccagtttctacttccgctttgattattgctactcaattggcttttactgctgctttcgctttcgttttggttaagcaaaagttcaccgcctactctattaacgctgttgttttgttgactgttggtgcagttgttttgggtttacacactaatggtgatagacctgctggtgaatctaacaaagaatactggttgggtttctgtttgacagttgcagctgctgcattatacggtttcattttgccattgatcgagctgatgtacaagaaggctagacaagaattgacctactccttgatcatggaaatccaattggttatgtgtttcttcgctaccgttttctgtaccgttggtatgatcattaacaacgatttccaagccatttccagggaagctaaagaatatgaattgggcgaaacgaagtactacttggttgttgtttggtccgctattatttggcaatgttttttcttgggtgccatcggtgttatcttctactcttcttctttgttgtccgccattatcatcacagttttgttgccagtcattgaaatcttggccgttattttctaccacgaaaagttccaagttgagaagggtatctctctgtttttgtctttgtggggttttatctcctactttttgggtgaaatcaagcacaacaagaaaaacaaggacaacttgaacgaagatcagccatctgaagttcaattggcacatcaaaactctgtcccatga

SEQ ID NO: 537 - protein, 369 aa, Aquilegia coerulea
MEIESQANNHEEEFNKQKTVQKIFLKRMILLMNCAILSIGNTGGPLLLRLYFIRGGKRVWLSCWLETGGWPIMLIPLLGSYIYRVRKSKEKAKLLFITPFLFVAGAVLGVLTGVDDYLYAYGVSKLPVSTSALIISTQLVFTAGFAFLLVKQKFTSYTINAIVLLTVAAVVLGVRASSDRPNGESKMEYFTGFFMTLGASALYGFVLPMVELTYKKSKTKISYTLVIEMQMVMSLFATAFCTIGMLINKDFQAIPREAKAYELGEAKYYTVLVSNAIVWQFFFLGAIGVIFSASSLLSGIMIAVLLPLTESLAVVFYHEKFSSEKGIALALSLWGFVSYFYGEYKQTKQLQQSIIESKTNTVVNASSPT

SEQ ID NO: 538 - DNA, 1110 bp, Aquilegia coerulea
  source 1..1110: mol_type = other DNA
atggaaatcgaatcccaagccaacaaccacgaagaagaattcaacaagcaaaagaccgtccaaaagatcttcttgaagaggatgatcttgttgatgaactgcgccattttgtctattggtaatactggtggtcctctgttgttgaggttgtactttattagaggtggtaagagagtttggttgtcttgttggttggaaactggtggttggccaattatgttgattccattattgggctcctacatctacagagtgagaaagtctaaagaaaaggccaagttgttgttcatcaccccatttttgtttgttgctggtgctgttttgggtgttttgactggtgttgatgattacttgtatgcctacggtgtttctaagttgccagtttctacttccgccttgattatttctacccaattggtttttactgccggtttcgcttttttgttggtgaagcaaaagttcacctcctacactattaacgccatcgttttgttgactgttgctgcagttgttttaggtgttagagcttcttctgatagaccaaacggtgaatctaagatggaatacttcactggtttctttatgaccttgggtgcttctgcattatacggttttgttttgccaatggtcgaactgacttacaagaagtctaagaccaagatctcttacaccttggtcatcgaaatgcaaatggtcatgtctttgtttgctactgctttctgtaccatcggcatgttgattaacaaggatttccaagccattccaagagaagctaaagcttatgaattgggtgaagctaagtactacaccgtcttggtttctaatgctatcgtttggcagttttttttcttgggtgcaatcggtgttattttctccgcttcttctttgttgtccggtattatgattgcagtcttgttgccattgactgaatctttggctgttgttttctaccacgagaagttctcttcagaaaagggtattgctttggctttgtctttgtggggtttcgtttcttacttttacggtgagtacaagcagaccaagcaattgcaacaatccatcattgaatccaagaccaataccgttgttaatgcttcttctccaacctaa

SEQ ID NO: 539 - protein, 397 aa, Papaver somniferum
MKHIVENDQSNMKGGVLVSSNSHEHHHHQGADNKKKKKMKLVILIVNCILLSVAQISGPLLLRIYYLHGGQRKWLSSWLQTVAFPFLLIPISVSWFRSKSKSHDSRSISAIDVNPTTDRKLRFGGFSPKLFISCIFLGIIVGLDSFLYAYGVSYLPVSTSSLLMSTQLAFTAAFALLLVRQKFTPYSINSVVLLTLGAVVLAFHTNGDKPIGVSKAQYFLGFFLTLGAAALFGFMLPFIELVYRKASEAITYDLVMRMQFITSMVATVFCTIAMLINKDFQAISREAKGFELGETKYYIVLICTAVSMQCAVVGTLGVIHCATSLFSGVLMTLLLPIQQICAIFFFNEKFSAEKGMSLGLSIWGFASYFYGEYKQTKKKTNQHKAVSTKSQEIPDEV

SEQ ID NO: 540 - DNA, 1194 bp, Papaver somniferum
  source 1..1194: mol_type = other DNA
atgaagcacatcgtcgaaaacgaccagtctaatatgaaaggtggtgtcttggtttcctccaactctcatgaacatcatcatcaccaaggtgccgataacaaaaagaaaaagaagatgaagctggtcatcctgatcgttaactgcattttgttgtccgttgctcaaatttctggtcccttgttgttgagaatctactacttgcatggtggtcaaagaaagtggttatcttcttggttgcaaactgttgctttcccctttttgttgatcccaatttccgtttcctggttcagatctaagtctaagtctcacgattccagatccatttccgctattgatgttaacccaactaccgacagaaagttgagatttggtggtttttcacccaagttgttcatcagctgtattttcttgggtatcatcgtcggtttggactcattcttgtatgcttatggtgtttcctacttgccagtttctacttcctctttgttgatgtctactcaattggcttttactgctgctttcgctttgttgttggttagacaaaagttcaccccatactccatcaactctgttgttttgttgactttgggtgcagttgttttggcttttcataccaatggtgataagccaatcggtgtttctaaggctcaatactttttgggtttcttcttaacattgggtgctgcagctttgtttggttttatgttgccattcatcgagctggtttacagaaaagcttctgaagctattacctacgacttggttatgagaatgcaattcatcacctctatggttgctactgttttctgtaccattgccatgttgattaacaaggatttccaagccatttccagagaagctaagggttttgaattaggcgaaacgaagtactacatcgttttgatctgtaccgctgtttctatgcaatgtgccgttgttggtactttaggtgttattcattgtgccacgtctttgttctctggtgttttaatgaccctgttgttgccaattcaacaaatttgcgctatcttcttcttcaacgaaaaattctctgccgagaagggtatgtctttgggtttgtctatttggggttttgcctcttacttttacggtgagtacaagcagaccaaaaaaaagaccaatcaacacaaagccgtgtccacaaagtctcaagaaattccagatgaagtctaa

SEQ ID NO: 541 - protein, 347 aa, Papaver atlanticum
MEKYLLLFNCILLAVCSAGGPLLLRLYFIHGGKRLWLSSWLETAGWPILFLPLSLSYFLKRRRFKNGQDEKPSKFFMITPFLFMASAFIGLLVGLDDYLYTYGVSLLPVSTASLIMSTHVAFTAGFALFMVKQKFTSYSVNAVILLTVGAVLLGLHSNGDRSVHESNRDYYLGFVMTIGASVIGGLLLPLVELMYKKSKQTITYTLVTELQIVISVFATLFCTVGMLVNNDFKVIQREGKEYDLGETKYYVVLVASSITWQLCFLGTIGVIFCSTSLLAGVIGAAVLPVIEILGVIFYHESFKAEKGIALFLSLWGFISYFYLEIKASRKPKRQCSELEQGGLTVSS

SEQ ID NO: 542 - DNA, 1044 bp, Papaver atlanticum
  source 1..1044: mol_type = other DNA
atggaaaagtacctgctgctgttcaactgcattttgttggctgtttgttctgctggtggtcctttgttgttgaggttgtactttattcatggtggtaagaggttgtggttgtcatcttggttggaaactgctggttggccaattttgtttttgccattgtccttgtcctactttttgaagcgtagaagattcaagaacggtcaagacgaaaagccatctaagttcttcatgattacccctttcttgttcatggcttctgctttcattggtttgttggttggtttggatgattacttgtacacctacggtgtttctttgttgccagtttctactgcctctttgattatgtctactcatgttgcttttaccgctggttttgctttgtttatggtcaagcaaaagttcacctcctactctgttaacgccgttattttgttaactgttggtgctgtcttgttgggcttgcattctaatggtgatagatctgttcacgaatccaacagagattactacttgggtttcgttatgactattggtgcctctgttattggtggtttgttattgcctttggtcgagttgatgtacaagaagtctaagcaaactatcacctacaccttggttaccgaattgcaaatcgttatttctgttttcgctaccttgttctgtaccgttggtatgttagttaacaacgacttcaaggtcattcagcgtgaaggtaaagaatacgatttgggtgaaactaagtactacgttgttttggttgcctcttctattacctggcaattgtgtttcttgggtactatcggtgttattttctgctctacctctttgttagctggtgttattggagctgctgttttgccagttattgaaatcttgggtgttatcttctaccacgaatctttcaaagccgaaaagggtattgccttgtttttgtctttgtggggtttcatctcttacttctacttggaaatcaaggcctccagaaagccaaaaagacaatgttctgaattggagcaaggtggtttgactgtttcttcttga

SEQ ID NO: 543 - protein, 385 aa, Glaucium Flavum
METPINIAANEEKTQDEKSKTYTEYPAKTKNWPLIILNTVIMTIGVIGGPLLMRLYYIHGGNRRWLSSCIQNAGFPILLIPLTFLFFQYSKTPHQENHHLSSSPLSSKPSSFLMEPKLFLSSSFVGILFGLNNFMYSLGLSYIPISTSSLLFATQLAFVAFFAWLIVKQQFTAYSINSVVLMTLGSILLGVKNDGDRPVGVTKAEYMLGFLLTLGSAALVGFILPLVELSYSKATRHVNYTTILQYQLNLALFSTIFNSIGMVINKDFQAIPREASEFELGKTMYYTILITGAIIWQLSFIGGLGVILYTSSLFSGILTSVLLPFTEIAAVIVYRESFTGLKGMALALCLWGFTSYFYGEYKMMKNMKTKTSEKVVDNDEEPCTV

SEQ ID NO: 544 - DNA, 1158 bp, Glaucium Flavum
  source 1..1158: mol_type = other DNA
atggaaacgccaatcaacattgctgccaacgaagaaaaaactcaggacgaaaaatctaagacctacactgaatacccagctaagacaaaaaactggccattgattatcttgaacaccgtcattatgaccatcggtgttattggtggtccattattgatgaggttgtactacattcatggtggtaacagaagatggttgtcctcttgtattcaaaatgctggtttccccattctgttgatcccattgacttttttgttcttccagtactctaagaccccacatcaagaaaaccatcacttgtcatcttctccattgtcctctaagccatcctcatttttgatggaacctaagctgttcctgtcctcttcttttgttggtattttgttcggcttgaacaacttcatgtacagcttgggtttgagctatattccaatctccacttcgtctttgttgttcgctactcaattggcttttgttgcttttttcgcttggttgatcgtcaagcaacaattcactgcttactccatcaactccgttgttttgatgactttgggttccattttgttgggtgttaagaacgatggtgatagaccagttggtgttacaaaagctgagtacatgttgggtttcttgttgactttaggttctgctgctttggttggtttcattttgccattggttgagctgtcttactctaaggctactagacatgttaactacaccaccatcttgcaataccaattgaacttggctttgttcagcaccatcttcaactctattggtatggttatcaacaaggacttccaagctattccaagagaagcctctgaatttgaattgggtaagactatgtactacacgatcttgattaccggtgccattatttggcaattgtctttcattggtggtttgggcgttatcttgtacacatcttctttgttctccggtatcttgacctctgttttgttgccattcactgaaattgctgccgttatcgtttacagagaatctttcactggtttgaaaggtatggctttggctttatgtttgtggggttttacctcttacttttacggtgagtacaagatgatgaagaatatgaagaccaagacctccgaaaaggttgttgacaacgatgaagaaccatgtaccgtttga

SEQ ID NO: 545 - protein, 368 aa, Papaver somniferum
MAIDIERIEEGDLDDNHDNNHAKSGDENSDFNSMMAKWGLLLLNCMLSAVGTIGGPLLLRLYFLHGGGRKWISSALQTAGFPILLIPLAVLYFRDRKTIGVGKFFASPKLLLSAAVIGVLLGLETFMYSYGLSFLPVSTSSLLISTQLVFTACFAFVMVHQKFTPYSINAAVLMTLGSILLAIRKNGDRPPGVTTSQYLLGFILSIAAAGLAGFILPCTEVAYAKSSKPMTYCLVLQYQFCMTFFATAFCAVGMFVNNDFSAMQREANAYELGATKYYMVLVSSAVVWQLMFVGTLGIIFCTSSLFSGVITATLLPLTEIAALIIFHEKFTGEKGMALALSLWGFTSYFYGSYRETKNQTQTNLEAKT

SEQ ID NO: 546 - DNA, 1107 bp, Papaver somniferum
  source 1..1107: mol_type = other DNA
atggccatcgacatcgaaagaattgaagaaggtgatttggacgataaccacgataacaatcatgctaaatctggtgacgaaaactccgactttaattccatgatggctaaatggggtctgttgttgttgaactgtatgttgtctgctgttggtactattggtggtcctttgttgttaaggttgtacttcttgcatggtggtggtagaaaatggatttcttctgctttacaaactgctggcttcccaattttgttgattccattggctgtcttgtacttcagagatagaaaaaccattggtgtcggtaagtttttcgcttctccaaagttgttgttatccgctgctgttatcggtgttttgttgggtttagaaaccttcatgtactcctacggtttgtcttttttgccagtttctacctcctccttgttgatttctactcaattggttttcaccgcttgcttcgcttttgttatggttcatcaaaagttcacgccctactctatcaatgctgctgttttgatgactttgggctctattttgttggccattagaaagaatggtgatagaccaccaggtgttactacttctcaatacttgttaggcttcatcttgtctattgctgctgctggtttggctggtttcattttgccatgtactgaagttgcttacgccaaatcttctaagccaatgacttactgtttggtcttgcaataccagttctgtatgacttttttcgctactgctttttgtgccgttggtatgttcgttaacaatgatttctctgccatgcaaagggaagctaatgcttatgaattgggtgctactaagtactatatggtcttggtttcttcagccgttgtttggcaattgatgttcgttggtactctgggtattatcttctgtacctcttctttgttctccggtgttattactgctactttgttgccattgacagaaattgctgccttgattatcttccatgagaagttcactggtgaaaaaggtatggctttggctttgtctttatggggttttacctcttacttctacggttcctatcgtgaaactaagaaccagactcaaactaacttggaagctaagacctga

SEQ ID NO: 547 - protein, 366 aa, Cinnamomum micranthum f. kanehirae
MAMDIEKVEEGVVPRTEYNNKAPPSSEEKAQKKSSINWLLLLLNFTLTAIGTIGGPLLLRLYFLHGGGRKWLTSWLQTAGFPFLILPLSILYIRERARGTHTHFLAEPKLLISSAAIGLLLGLDNFLYSYGVSLLPVSTSSLLFSTQLAFTAFFALIIVRQKFSPFSINAVVLMTLGSVLLGIRKSGDRPANVTNGEYLLGFVITLGAAALLGFVLPCIEMTYAKASRAISFTVVMQFQLGVTFFATLFCTIGMIINKDFTAIGREASAYGLGETKYYMVLTAIAILFQMVFVGSLGIVFCTSSLFAGVVAATLLPITEIAAVIVYHEKFTGEKGMALALCLWGFTSYFYGAYRTEKKQTPQTESD

SEQ ID NO: 548 - DNA, 1101 bp, Cinnamomum micranthum f. kanehirae
  source 1..1101: mol_type = other DNA
atggccatggatatcgaaaaggttgaagaaggtgttgttccaagaactgagtacaacaacaaagctccaccatcctctgaagaaaaggctcaaaagaaatcctccatcaactggttgctgttgttgttgaatttcaccttgactgccattggtactattggtggtcctttgttattgaggttgtacttcttgcatggtggtggtagaaaatggttaacttcttggttgcaaactgctggtttcccatttttgattctgccattgtccatcttgtacatcagagaaagagctagaggtactcatacccattttttggctgaacctaagctgttgatttcctctgctgctattggtttgttgttaggtttggacaacttcttgtactcctacggtgtttctttgttgccagtttctacttcctccttgttgttctctactcaattggcttttactgctttcttcgccttgattatcgtcagacaaaagttctctccattctccattaacgccgttgttttgatgactttgggttctgttttgttgggcattagaaagtctggtgatagaccagctaatgttaccaatggtgaatacttgttgggtttcgttattactttgggtgctgctgctttattgggttttgtcttgccatgtattgaaatgacttacgctaaagcctccagagctatttctttcactgttgtcatgcaattccaattgggtgttacttttttcgctaccttgttctgcactatcggtatgattatcaacaaggatttcaccgctattggtagagaagcttcagcttatggtttgggtgaaactaagtactacatggttttgaccgccattgccattttgttccaaatggtttttgttggctctctgggtatcgttttctgtacctcttctttgttcgctggtgttgttgctgctacattattgccaattactgaaattgctgccgttatcgtttaccacgaaaagttcactggtgaaaaaggtatggctttggctttgtgtttgtggggttttacttcttacttttacggtgcttacaggaccgaaaaaaagcaaactccacaaaccgaatccgactga

SEQ ID NO: 549 - protein, 390 aa, Papaver somniferum
MATSAMDIETIGILGTTQNGNSETHTEKTIETKNWLLITINCAFTICGAVGGPLLMRLYYLHGGSRIWLSSFEASAGFPILIFPLIFLFFRSKSSADKILSSFWLETKLFLWGAILGILYGLVTFMYALGLSYIPLSTSSLLMATQLCFTAFFAWLIVKQKFTAFVINAVVVMTLGSVVLGINTDGDRPVGVSKAQYLLGFLLTLGAAALAGLITPLIELAFSKATRNLCYSSLLNFQVILSVFSTIVCVIGMLVNKDFQAIPREANDFELGKANYYIIMIVTAIIWQLLGVGTVGVIFYTSALFSGILGSVLVPLTGVTAIMFYHESFTGLKGMALALCFWGLCSYFYGEYKMMKKVVHDETPETIDNIENDPNRLDNQDAPYTLNQVL

SEQ ID NO: 550 - DNA, 1173 bp, Papaver somniferum
  source 1..1173: mol_type = other DNA
atggctacctccgctatggatattgaaaccattggtattttgggtactacccagaatggtaactctgaaactcataccgaaaagaccatcgaaactaagaactggttgttgattaccattaactgcgctttcactatttgtggtgctgttggtggtccattattgatgagactatattacttgcacggtggttccagaatttggttgtctagttttgaagcttctgctggtttcccaattttgatcttcccactgattttcttgttcttcaggtccaaatcttccgccgataagattttgtcatctttctggttggagactaagttgtttttgtggggtgctatattgggtatcttgtacggtttggttactttcatgtatgccttgggtttgtcctatattccattgtctacttcgtctttgttgatggctactcaattgtgtttcactgcttttttcgcttggttgatcgtcaagcaaaagtttactgccttcgttattaacgccgttgttgttatgactttgggttctgttgttttgggtattaacaccgatggtgatagaccagttggtgtttctaaagctcaatacttgttgggtttcttgttgactttaggtgctgctgctttggctggtttgattactccattgattgaattggctttctccaaggctactagaaacttgtgttactcctccttgttgaacttccaagttatcctgtctgttttctctaccatcgtttgcgttattggtatgttggttaacaaggacttccaagccattccaagagaagctaatgatttcgaattgggcaaagccaactactacatcattatgatcgttaccgctatcatctggcaattattaggtgttggtactgtcggtgttatcttctatacttctgctttgttctctggtatcttgggttcagttttggttccattgactggtgttactgccattatgttctaccatgaatctttcaccggtttgaaaggtatggctttggctttgtgtttttggggtttgtgttcttacttttacggcgagtacaagatgatgaagaaagttgttcatgacgaaaccccagaaaccatcgataacattgaaaacgatccaaacagattggataatcaagatgctccctacaccttgaatcaagtcttgtaa

SEQ ID NO: 551 - protein, 370 aa, Rosa chinensis
MQMETTEDEQRKATALKRLLLILSCVFLSIGNCGGPLIMRLYFIHGGKRVWLSSMLETGGWPIILVPIAIAYYHRRKNQAPTEPPTKLFFMKIPLFVASAVIGVLTGLDDYLYAYGVARLPVSTSSLIIAAQLAFTALFAFILVKQKFTSYSINAIVLLTVGAAVLGLNTNSDRPEGESNAQYMLGFMMTVAAAALYGFVLPLVELMYKKAKQNITYALVLEIQLVMCLFATIFCTVGMLVNNDFKVIPREARKFELGETTYYVVLVVSAIIWQGFFLGAIGIIFCASSLLSGIVIAVLLPITEIFAVIFYHEKFQAEKGVSLVLSLWGFVSYFYGEIKHNKESKRVKKKENNKDSSGQDTENPQSVPNP

SEQ ID NO: 552 - DNA, 1113 bp, Rosa chinensis
  source 1..1113: mol_type = other DNA
atgcagatggaaaccaccgaagatgaacaaagaaaagctactgctttgaagaggctgttgttgattttgtcttgcgtgttcttgtctattggtaattgtggtggtccattgatcatgaggttgtactttattcatggtggtaagagagtctggctgtcatctatgttggaaactggtggttggccaatcattttggttccaattgctattgcctactaccacagaagaaaaaatcaagctccaactgaaccacctaccaagttgttttttatgaagatccctttgttcgttgcctccgctgttattggtgttttgactggtttggatgattacttgtatgcttacggtgttgctagattgccagtttctacttcctctttgattattgctgctcaattggctttcactgctttgttcgcttttatcttggtcaagcaaaagttcacctcctactctattaacgccatcgttttgttgactgttggtgctgctgttttgggtttgaacactaattctgatagaccagaaggtgaatctaacgctcagtatatgttgggtttcatgatgacagttgcagctgctgcattatacggttttgttttgccattggtcgagctgatgtacaaaaaagccaagcaaaacattacctacgccttggttttggaaatccaattggttatgtgtttgttcgccaccattttctgtactgttggtatgttggttaacaacgacttcaaggttattccaagagaagccagaaagttcgaattgggtgaaactacttactacgttgtcttggttgtttccgccattatttggcaaggttttttcttgggtgctatcggtattatcttctgcgcttcttctttattgtccggtatcgttattgcagtcttgttgccaattaccgaaattttcgccgttatcttctaccacgaaaagttccaagctgaaaagggtgtttctttggttttgtctttgtggggtttcgtgtcttacttttacggtgaaatcaagcacaacaaagagtccaagagagtcaagaagaaagagaacaacaaggactcttctggtcaagatactgaaaacccacaatctgttccaaatccataa

SEQ ID NO: 553 - protein, 357 aa, Durio zibethinus
MEVVKEHKPGTTMRKSLLVINCIILSIGNCGGPLLMRLYFIHGGKRVWFSSWLETGGWPIILFPIACAYMHRSRTQPTSKNKLFFIKPPLFIAAAVIGTLTGLDDYLYAYGVARLPVSTSSLIIASQLAFTAGFAFLLVKQKFTSYSINAVFLLTIGAGVLALHTSGDRPANESNREYVLGFLMTLAASALYGFILPLVELMYKKANQEISYALVMEIQMVMCLSATGFCTVGMLVNKDFKVIPREAREFELGETKYYVVAIWSAIIWQCFFLGAIGVIFCASSLLSGIIIAVLLPVTEILAVIFYKEKFQAEKGVALALSLWGFISYFYGEIKQIKKKKPAPETEMPSVPNSVESV

SEQ ID NO: 554 - DNA, 1074 bp, Durio zibethinus
  source 1..1074: mol_type = other DNA
atggaagtcgtcaaagaacacaagccaggtactactatgagaaagtctttgttggttatcaactgcatcatcttgtccattggtaattgtggtggtccattattgatgaggttgtactttattcacggtggtaagagagtttggttctcttcttggttggaaactggtggttggccaattatcttgtttccaattgcttgtgcctacatgcatagatctagaactcaacctacttccaagaacaagctgtttttcattaagccacctttgttcattgctgctgctgttattggtactttgactggtttggatgattacttgtatgcttacggtgttgctagattgccagtttctacttcctctttgattatcgcttctcaattggcttttactgctggttttgctttcttgttggtcaagcaaaagttcacctcctactctattaacgccgtttttttgttgactattggtgctggtgttttggccttgcatacttctggtgatagaccagctaatgaatccaacagagaatacgttttgggtttcttgatgactttggctgcttctgcattatacggtttcattttgccattggtcgagctgatgtacaagaaggctaatcaagaaatctcctacgccttggttatggaaatccaaatggttatgtgtttgtctgctactggtttctgtactgttggtatgttggttaacaaggacttcaaggttattccaagagaagccagggaatttgaattgggtgaaactaagtattacgttgtcgctatttggtccgccattatttggcaatgttttttcttgggtgctatcggtgttattttctgcgcttcttctttgttgtccggtattatcattgctgttttgttgccagttaccgaaattttggctgtcatcttctacaaagaaaagttccaagctgaaaagggtgttgctttggctttgtctttgtggggttttatctcttacttctacggtgaaatcaagcagatcaagaaaaagaaaccagctccagaaactgaaatgccatctgttccaaattccgttgaatccgtttga

SEQ ID NO: 555 - protein, 359 aa, Olea europaea var. sylvestris
MDTANTETQTNTGMKKALLGLNCIILAIGNCGGPLVMRLYFIRGGKRIWFSSWLQTVGWPIIFIPLTIAYIHRRKTGGSTTKTQFFLMKPRLFIASATIGVLTGLDDYLTAYGVAKLPVSTSSLIIATQLAFTAGFAFLLVKQKFTGYSINAVVLLTVGAVILGLHTSSDRPEGESKKEYLLGFFLILVASALYGFILPLVEYMYSKAKQAITYTLVLEIQMVMCFFATAFCTVGMLINNDFQAISREAEEYELGEDKYYLVVVWNAIVWQCFFLGSIGVIFYSSSLLSGIVLTFLLPVTEVLAVIFYHEKFQAEKGVSLFLSLWGFISYFYGEIKHGTNKKNDKHDSSQTEMTPTVVP

SEQ ID NO: 556 - DNA, 1080 bp, Olea europaea var. sylvestris
  source 1..1080: mol_type = other DNA
atggataccgctaacactgaaacccaaactaatactggtatgaagaaggctttgttgggtttgaactgcattattttggctattggtaattgcggtggtccattggttatgaggttgtactttattagaggtggtaagaggatctggttctcttcttggttgcaaactgttggttggccaattatcttcatcccattgaccattgcctacatccatagaagaaaaactggtggttctactactaagacccagttctttttgatgaagcccaggttgtttattgcttctgctactattggtgttttgaccggtttggatgattacttgactgcttatggtgttgctaagttgccagtttctacctcctctttgattattgctactcaattggctttcactgctggttttgctttcttgttggttaagcaaaagttcaccggttactccattaacgctgttgttttgttgactgttggtgctgttattttgggcttgcatacttcttcagatagaccagaaggtgagtccaagaaagaatacttgttaggcttcttcttgatcttggtcgcttctgcattatacggtttcattttgccattggtcgagtatatgtactccaaagctaagcaagctattacctacaccttggtcttggaaatccaaatggttatgtgtttcttcgctactgctttctgtactgttggcatgttgattaacaacgacttccaagccatttccagagaagctgaagaatatgaactaggtgaggacaagtactacttggttgttgtttggaatgctatcgtttggcagtgttttttcttgggttcaatcggtgttatcttctactcctcatctttgttgtctggtatcgttctgacttttttgttgccagtcactgaagttttggccgttattttctaccacgaaaagttccaagctgaaaagggtgtttctctgtttttgtctttgtggggtttcatctcttacttctacggtgaaatcaaacatggcacgaacaagaagaatgacaagcacgattcttctcaaactgaaatgactccaactgttgtcccatga

SEQ ID NO: 557 - protein, 341 aa, Coffea eugenioides
MEKFLLTVNCFLLAFGTTGGPLIMRLYFIHGGERVWLSAWLETGGWPIIIIPLMIAYFHRRKNQESNAKLIYITPKIFISFVVIGVLTGVDDFLYAHGVAKLPVSTYSLLIATQLAFTAFFAFILVRQKFTPYSINAVAMLTLGAGVLAMHTSSDRPEGVTKREYYVGFFMTLGASALYGFVLPLIELTYMKAKNAITYTLVLEIQLVMCFFATAFCTAGMLVNKDFQAISREAKTYELGEVTFYVVLVWTAISWQCFFLGAIGLIFSASSLLSGIIIAVMLPLTEILAVIFYHESFKVEKALALVLSLWGFVSYFYGEIKHNKKKSSAKDQTDIAEFVAP

SEQ ID NO: 558 - DNA, 1026 bp, Coffea eugenioides
  source 1..1026: mol_type = other DNA
atggaaaagttcctgttgaccgtcaactgttttttgttggcttttggtactactggtggtccattgatcatgaggttgtactttattcatggtggtgaaagagtttggttgtctgcttggttggaaactggtggttggccaattatcattatcccattgatgattgcctacttccacaggcgtaaaaatcaagaatctaacgccaagttgatctacatcaccccaaagattttcatctccttcgttgttattggtgttttgaccggtgttgatgatttcttgtatgctcatggtgttgctaagttgccagtttctacttactctttgttgatcgctactcaattggctttcactgctttcttcgctttcattttggtcagacaaaagttcaccccatactccattaacgctgttgctatgttgactttaggtgctggtgttttagctatgcatacctcttcagatagaccagaaggtgttactaagagagaatattacgtcggtttctttatgaccttgggtgcttctgcattatacggttttgttttgccattgatcgagctgacttacatgaaggctaagaacgctattacttacaccttggtcttggaaatccaactggttatgtgttttttcgctaccgctttctgtactgctggtatgttggttaacaaggacttccaagctatttccagagaagctaagacttacgaattgggtgaagttaccttctacgttgttttggtttggactgctatttcttggcaatgtttctttttgggtgccatcggtttgattttctctgcttcttctttgttgtccggtatcattattgctgtcatgttgcctttgaccgaaattttggctgttatcttctaccacgaatccttcaaagttgaaaaggctttggctttggttttgtctttgtggggtttcgtttcttacttctacggtgaaatcaagcacaacaagaaaaagtcctctgctaaggaccaaaccgatattgctgaatttgttgctccataa

SEQ ID NO: 559 - protein, 397 aa, Papaver somniferum
MKSIVENDQSNMKGGVLVSSNSHEHHHHQEEDNKKKKKMKLVILIVNCIFLSVAQITGPLLLRVYYLHGGQRKWLSSWLQTVAFPFLLIPISVSWFKSKSKSHDSRSISAIDVNPTTDRKLRFGGFSPKLFISCIFLGIIVGLDSFLYAYGVSYLPVSTSSLLMSTQLAFTAAFALLLVRQKFTPYSINSVVLLTLGAVVLAFHTNGDKPIGVSKDQYFLGFFVTLGAAALFGFMLPFIELVYRKACEAVTYDLVMRMQFIISMVATVFCTIAMLINKDFQAISREAKGFELGETKYYIVLIFTAVSMQCAVVGTLGVIHCASSLFSGVLMTLLLPIQQICAIFFFNEKFSAEKGMSLGLSIWGFASYFYGEYKQTKKKTNQHKAVPINSQEIPDEV

SEQ ID NO: 560 - DNA, 1194 bp, Papaver somniferum
  source 1..1194: mol_type = other DNA
atgaagtccatcgtcgaaaacgaccagtctaatatgaaaggtggtgtcttggtttcctccaactctcatgaacatcatcatcaccaagaagaggacaacaaaaagaaaaagaagatgaagctggtcatcctgatcgttaactgcatttttttgtccgttgctcaaattaccggtcctttgttgttgagagtttactacttgcatggtggtcaaagaaagtggttgtcatcttggttgcaaactgttgcttttcccttcttgttgatcccaatttccgtttcctggttcaagtccaaatctaagtctcacgattccagatccatttccgctattgatgttaacccaactaccgacagaaagttgagatttggtggtttttcacccaagttgttcatcagctgtattttcttgggtatcatcgtcggtttggactcattcttgtatgcttatggtgtttcctacttgccagtttctacttcctctttgttgatgtctactcaattggcttttactgctgctttcgccttgttgttggttagacaaaagtttaccccatactccatcaactccgttgttttgttgactttgggtgctgttgttttggcttttcataccaatggtgataagccaatcggtgtttctaaggaccaatactttttgggtttcttcgttactttaggtgctgcagctttgtttggttttatgttgccattcatcgagctggtttacagaaaagcttgtgaagctgttacctacgatttggttatgagaatgcagttcatcatctctatggttgctactgttttctgcaccattgccatgttgattaacaaggatttccaagccatttccagagaagctaagggttttgaattaggcgaaacgaagtactacatcgtcttgatttttaccgccgtttctatgcaatgtgcagttgttggtacattgggtgttattcattgtgcctcatctttgttctctggtgttttgatgaccctgttgttgccaattcaacaaatttgcgctatcttcttcttcaacgaaaaattctctgccgagaagggtatgtctttgggtttgtctatttggggttttgcctcttacttttacggtgagtacaagcagactaagaagaaaactaatcaacacaaggccgtgccaatcaactctcaagaaattccagatgaagtctaa

SEQ ID NO: 561 - protein, 351 aa, Papaver miyabeanum
MEKYLLLFNCILLAVGSTAGPLLLRLYFIHGGKRLWLSSWLETAGWPILFLPLSLSYFLKRRRFKTGQDEKPSKFFMITPFLFMASAFIGILVGLDDYLYTYGVSLLPVSTSALIMSTHLAFTAGFALFMVKQKFTSYSVNAVVLLTVGAILLGLHSNGDRPLYESNRDYYLGFVMTIGASVIGGLLTPLVELMYKKSKQTITYTLVIELQIVMSVFATLFCTVGMLVNNDFKVIQREGKEYDLGETKYYVVLVASSITWQLCFLGIVGVVFCSTSLLAGVIGAVVVPVIEILGVIFYHESFKAEKGIALFLSLWGFISYFYLELKEIKKPKNHHSELEEDLTVSSQSNLA

SEQ ID NO: 562 - DNA, 1056 bp, Papaver miyabeanum
  source 1..1056: mol_type = other DNA
atggaaaagtacctgctgctgttcaactgcattttgttggctgttggttctactgctggtcctttgttgttgaggttgtactttattcatggtggtaagaggttgtggttgtcatcttggttggaaactgctggttggccaattttgtttttgccattgtccttgtcctactttctgaagagaagaagattcaagactggtcaagacgaaaagccatctaagttcttcatgattacccctttcttgttcatggcttctgccttcattggtattttggttggtttggatgattacttgtacacctacggtgtttctttgttgccagtttctacttccgctttgattatgtctactcatttggcttttaccgctggttttgctttgtttatggtcaagcaaaagttcacctcctactctgttaatgccgttgttttgttaaccgttggtgctatcttgttgggcttgcattctaatggtgatagaccactgtacgaatccaacagagattactacttgggtttcgttatgactattggtgcctctgttattggtggtttgttgactccattggtcgaattgatgtacaagaagtccaagcaaactatcacctacaccttggttatcgaattgcaaatcgtcatgtctgttttcgctactttgttctgtactgttggtatgttggtcaacaacgatttcaaggtcattcagcgtgaaggtaaagaatacgatttgggtgaaactaagtactacgttgtcttggttgcttcttctattacctggcaattgtgtttcttgggtatcgttggtgttgttttctgttctacctctttgttggccggtgttataggtgctgttgttgttccagttattgaaatcttgggtgtcatcttctaccacgaatcttttaaagccgaaaagggtattgccctgtttttgtctttgtggggtttcatctcttacttctacttggagttgaaagagatcaagaagccaaagaaccatcactccgaattggaagaagatctgactgtttcttcccaatctaacttggcttga

SEQ ID NO: 563 - protein, 382 aa, Papaver bracteatum
MNIETLDILGPNQNGNSGTHTEQPIKTRNWLLIIINCALVFCGVIGGPLLMRLYYLHGGSRKWLSSFLQTAGFPVLIFPLIFLYIKSNSPTQNNDQSFSFFMEPKLFLWSAIVGIVFGVSNFMYALGLSYLPVSTSTILFATQLCFTAFFAWLIVKQEFTAFIINAVIVMTLGSVLLGINTNGDRPIGVSKAQYLIGFLMTLAAAALTGLGTPFIELAFFKATRNITYSTFLQFQITLGLFGTCLNVIGMLINKDFQAIPREADNFELGKGKYYMIICLTALTWQLSGIGLIGLIFYTNALFNGIYVSVLVPFTEVAAVIFYHEKFTGLKGMALALCLWGFSSYFYGEYKMMNKVGDNDNETHEKIQEVESDPKRLEDQEAP

SEQ ID NO: 564 - DNA, 1149 bp, Papaver bracteatum
  source 1..1149: mol_type = other DNA
atgaacatcgaaaccttggacatcttgggtccaaatcaaaatggtaactctggtactcataccgaacaacctattaagactagaaactggctgctgattattatcaactgcgctttggttttctgcggtgttattggtggtccattattgatgaggttgtactacttgcatggtggttctagaaaatggttgtcctctttcttgcaaactgctggttttccagttctgattttccctttgatcttcctgtacatcaagtccaattctccaactcaaaacaacgaccagtctttctcatttttcatggaacccaagttgttcttgtggtctgctatagttggtatcgttttcggtgtttccaatttcatgtatgccttgggtttgtcttacttgccagtttccacttccactattttgttcgctactcaattgtgtttcaccgctttttttgcttggttgatcgtcaagcaagaattcactgccttcattattaacgccgttatcgttatgactttgggctctgttttgttgggtattaacactaatggtgacagacctattggtgtttctaaggcccaatacttgattggtttcttgatgactttagctgctgctgctttgactggtttgggtactccttttattgaattggctttcttcaaggccaccagaaacattacttactccacattcttgcaattccagattaccttgggtctgtttggtacttgcttgaacgttattggcatgctgatcaacaaggatttccaagctattccaagagaagccgacaatttcgaattaggtaaaggcaagtactacatgatcatttgcttgacagctttgacttggcaattgtccggtattggtttaattggcttgatcttctacaccaacgctttgtttaatggcatctacgtttctgttttggtcccattcactgaagttgctgctgttattttctaccacgaaaagttcactggtttgaaaggtatggctttggctttgtgtttgtggggtttttcttcttacttttacggcgagtacaagatgatgaacaaggttggtgataacgacaacgaaactcacgaaaagatccaagaagttgaatccgatccaaagagattggaggatcaagaagctccataa

SEQ ID NO: 565 - protein, 386 aa, Papaver somniferum
MSALHIQMMEEGVLSPEIKPSTPSKNIKLSDGIHGDDGGDLKLKMNKQSIMEKWGLLVLYCIFAAVGFIGGPLLLRVYFLHGGSRKWLSSALQTAGFPILLMPLAIHYAKRDKAVPQIDFFASPKLLLSSIFIGILLGVSNFMYSYGLSFLPVSTSSILLSTNLIFTALFALILVRQKFSPFSINAIVIMTLGSVLLGVGQNGDRPEGVTSLQYLLGFILCIGAAASGGLALPCIEVAYTKANQVMTYPIVLQYQFFMALSATVFSIIGMAVNKDFQAMQREADEFGLGKMEYYLVLVSSAVVWQISYIGTLGIIFYATSIFAGVVSAVLLPLTEIAAVIVFHEKFTGEKGMALAMSVWGFLSYFYGTYKESKVQTQIDSTKNQPK

SEQ ID NO: 566 - DNA, 1161 bp, Papaver somniferum
  source 1..1161: mol_type = other DNA
atgtccgccttgcatatccagatgatggaagaaggtgttttgtctccagaaatcaaaccatctactccctccaagaacatcaaattgtctgatggtattcacggtgatgatggtggtgatttgaaactgaaaatgaacaagcagtccatcatggaaaaatggggtttgttggtcttgtactgtatttttgctgccgttggttttattggtggtcctttgttgttgagagtttacttcttgcatggtggttccagaaaatggttgtcatctgctttacaaactgctggtttcccaattttgttgatgccattggctattcattacgccaaaagagataaggccgttccacaaattgatttctttgcttctccaaagctgctgctgtcctctattttcattggtattttgttgggcgtgtccaacttcatgtattcttacggtttgtctttcttgccagtctccacttcttctatcttgttgtctaccaacttgattttcaccgctttgttcgccttgattttggtcagacaaaagttctctccattctccattaacgccatcgttattatgactttgggttccgttttgttaggtgttggtcaaaatggtgatagacctgaaggtgttacttccttgcaatatttgttgggtttcatcttgtgtattggtgctgctgcttctggtggtttggctttgccatgtattgaagttgcttacaccaaggccaatcaagttatgacttatccaatcgtcttgcagtaccaattcttcatggctttgtctgctaccgttttctctattattggtatggccgttaacaaggatttccaagctatgcaaagagaagctgacgaatttggtttgggtaagatggaatattacctggtcttggtttcttctgctgttgtttggcaaatttcctacattggtactttgggcattattttctacgccacttctattttcgctggtgttgtttcagctgttttgttgccattgactgaaattgctgctgttatcgttttccacgaaaagttcactggtgaaaaaggtatggctttggctatgtctgtttggggttttttgtcttacttctacggcacctacaaagaatctaaggttcaaacccaaatcgactctaccaagaatcaacctaagtaa

SEQ ID NO: 567 - protein, 360 aa, Aquilegia coerulea
MATNMHGLENGIQENQQNKQSAESSKMSLFIAKWWLLFLNFACCAVGTIGGPLLLRLYYLHGGSRKWIPGWLQTVGFPIHLIPILILYSRRSPGVKFFASPKLLLCAAVIGVFTGLDNFMYSLGLSYLPVSTSSLLLATQLVFTAFFSFIIARQKFTPFSINAVVLMTLGAVMLGLRNNGDRPQGVTSSEYMLGYILTIAAAGLLGFVLPVTEVTYAKATHSITYAIVLQFQFCTALFATIFCSIGMIANKDFQAIPREATQFDLGAGKYYLLLASSAVVWQLMFLGIMGTIFCTSSLFAGIMNATLLPFTQIAGVIVYKEKFTGEKGMALALSLWGFASYFYGAYRDNKKQTQKEVEEK

SEQ ID NO: 568 - DNA, 1083 bp, Aquilegia coerulea
  source 1..1083: mol_type = other DNA
atggccactaacatgcacggtttggaaaacggtattcaagaaaaccagcaaaacaagcaatccgccgaatcttctaagatgtctttgtttattgctaagtggtggctgctgtttttgaactttgcttgttgtgcagttggtactattggtggtcctttgttgttgaggttgtattacttgcatggtggttccagaaaatggattccaggttggttgcaaactgttggttttccaattcatctgatccccatcttgatcctgtattctagaagatctccaggtgttaagtttttcgcttctccaaagttgttgttgtgcgctgctgttattggtgtttttactggtttggacaacttcatgtacagcttgggtttgtcttatttgccagtttctacctcctctttgttattggctactcaattggtttttaccgccttcttctcattcattatcgccagacaaaagttcaccccattctctattaacgccgttgttttgatgactttgggtgctgttatgttgggtttgagaaacaatggtgatagacctcaaggtgttacttcttctgagtacatgttaggttacatcttgactattgctgctgctggtttgttaggttttgttttgcctgttactgaagttacctacgctaaagctactcattccattacttacgccattgtcttgcaattccaattctgtactgctttgttcgctaccatcttctgttccattggtatgattgctaacaaggacttccaagccattccaagagaagctacacaatttgacttaggtgctggtaagtactacttgttgttggcttcttctgctgttgtttggcaattgatgttcttgggtattatgggtactatcttctgcacctcttctttattcgctggtattatgaacgctaccttgttgccattcactcaaattgctggtgttatcgtctacaaagaaaagtttaccggtgaaaaaggtatggctttggctttgtctttatggggttttgcttcttacttttacggtgcctacagagacaacaaaaagcaaactcaaaaagaggtcgaagagaagtaa

SEQ ID NO: 569 - protein, 372 aa, Papaver somniferum
MDTSTMNIETPETLGPNQNHVEETRKARNWPLIIINCALVFCGVIGGPLLMRLYYLHGGSRKWLSSCLQTAGFPVLLFPLIFLYIKSKPSMQKNDQSCSFFMEPMVFVWSAIIGIVFGVSNFMYALGLSYLPVSTSIILFATQLCFTAFFAWLIVKQKFTAFIINAVIVMTLGSVLLGINTDGDRPIGVSKAQYLLGFLLTLAAAALTGLGMPFVELALSKATRNITYSTLLQFQIILGLFGTGLNVIGMLINKDFQAIPREADEFELGKGKYYMIIILTALTWQLASLGSLGIILYTNALFNGIYTSVLVPFTEVGAVIFFHESFTGLKGMALALCLWGFSSYFYGEYKMMNKVGNNDSTHEETEKVENET

SEQ ID NO: 570 - DNA, 1119 bp, Papaver somniferum
  source 1..1119: mol_type = other DNA
atggacacctccaccatgaacattgaaactccagaaactttgggtccaaaccagaatcatgttgaagaaactagaaaggctagaaactggccattgattattatcaactgcgctttggttttctgcggtgttattggtggtccattattgatgaggttgtactacttgcatggtggttctagaaaatggttgtcatcttgtttacaaaccgctggttttccagttttgttgttcccattgattttcttgtacatcaagagcaagccatccatgcaaaagaacgatcaatcttgctcattcttcatggaacctatggtttttgtttggtccgccattattggtatcgttttcggtgtttctaacttcatgtatgccttgggtttgtcttacttgccagtttccacttccattattttgttcgctacccaattgtgtttcaccgctttttttgcttggttgatcgtcaagcaaaagttcactgccttcattattaacgccgttatcgttatgactttgggctctgttttgttgggtattaacactgatggtgatagacctattggtgtctctaaagctcaatacttgttgggtttcttgttgactttggctgctgctgctttgactggtttgggtatgccatttgttgaattggctttgtctaaggccactagaaacattacttactccaccttgttgcagttccaaattatcttgggtttattcggtactggcttgaacgttataggcatgttgattaacaaggacttccaagccattccaagagaagctgacgaatttgaattaggtaaaggcaagtactacatgatcattatcttgaccgctttgacttggcaattggcttctttgggttctttaggtattatcttgtacaccaacgctctgttcaatggtatctacacttctgttttggttccattcactgaagttggtgccgttattttcttccatgaatctttcacaggtttgaaaggtatggctttggctttatgtttgtggggtttttcctcttacttttacggtgagtacaagatgatgaacaaggttggtaacaacgattctactcacgaagaaaccgaaaaggttgaaaacgaaacctaa

SEQ ID NO: 571 - protein, 373 aa, Fragaria vesca subsp. vesca
MQMETTDNEQRKAAALKRLLLILSSVLLSIGTCGGPLIMRLYFIHGGKRVWLSSMLETGGWPVILVPIAIAYYHRRKNQAPTDPPTKLFFMKLPLFVASAVIGVLTGLDDYLYAYGVARLPVSTSALIIAAQLAFTALFAFILVKQKFTSYSINAVVLLTVGAAVLGLNTSSDRPKGESNAQYMLGFVMTVAAAALYGFVLPLVELMYKKAKQNITYALVLEIQMVMSLFATIFCTVGMLVNNDFKVIPREARKFELGETTYYVVLVVSAIVWQTFFLGAIGLIFCASSLLSGIVIAVLLPVTEIFAVIFYHEKFQAEKGVSLALSLWGFVSYFYGEIKHNKQKKQADAVKEKENNKEGCTPDVENLQTVPNP

SEQ ID NO: 572 - DNA, 1122 bp, Fragaria vesca subsp. vesca
  source 1..1122: mol_type = other DNA
atgcagatggaaaccaccgacaacgaacaaagaaaagctgctgctttgaaaaggctgttgttgatcttatcctccgtcttgttgtctattggtacttgtggtggtccattgattatgaggttgtactttattcacggtggtaagagagtttggctgtcatctatgttggaaactggtggttggccagttattttggttccaattgctattgcctactaccacagaagaaaaaatcaagctccaactgatccacctaccaagttgttttttatgaagttgcctttgtttgttgcctccgctgttattggtgttttgactggtttggatgattacttgtatgcttacggtgttgctagattgccagtttctacttccgctttgattattgctgctcaattggcttttactgctttgttcgctttcatcttggtcaagcaaaagttcacctcctactctattaacgccgttgttttgttgactgttggtgctgctgttttgggtttgaatacttcttctgatagaccaaagggtgaatctaatgctcagtacatgttgggtttcgttatgacagttgcagctgctgcattatacggttttgttttgccattggtcgagctgatgtacaaaaaagccaagcaaaacattacctacgccttggttttggaaatccaaatggttatgtctctgttcgctaccattttctgtactgttggtatgttggttaacaacgacttcaaggttattccaagagaagccagaaagttcgaattgggtgaaactacttattacgtcgtcttggttgtttctgctatagtttggcaaactttcttcttgggtgctatcggtttgattttctgtgcttcatctttgttgtccggtatcgttattgcagttttgttgccagttaccgaaattttcgccgttattttctaccacgaaaagttccaagctgaaaagggtgtttctttggctttgtctttgtggggttttgtctcttacttttacggtgaaatcaagcacaacaagcaaaaaaagcaagctgatgccgtcaaagagaaagagaacaacaaagaaggttgtaccccagacgttgaaaacttgcaaactgttccaaatccataa

SEQ ID NO: 573 - protein, 355 aa, Ziziphus jujuba
MELEDQSNTKTKKALLILNCILLSIGNCGGPLIMRLYYIHGGKRIWLSSWLETGGWPIMLIPITVNYFRRRKTASATEGTTKFFQIKLPLFLASALIGLMTGFDDYLYAYGLARLPVSTSALIIASQLAFTAGFAYLLVRQKFTSYSVNAIVLLTVGGAVLALHTSGDRPKGESNKEYVMGFLFTVGASALYGFVLPLMELTYKKSRQSITYSLVLEIQMVMSLFATIFCTVGMLINKDFQAIPREARKFELGETMYYVLLVVTGITWQTFFLGAIGIIFCASSLLSAIVIAVLLPVTEILAVIFYSESFKAEKGVSLVLSLWGFVSYFYGDIKRAKKKKPQNPETEIPTPIAGP

SEQ ID NO: 574 - DNA, 1068 bp, Ziziphus jujuba
  source 1..1068: mol_type = other DNA
atggaattggaggaccagtctaacactaagactaagaaggctttgttgatcctgaactgcatcttgttgtctattggtaattgtggtggtccattgatcatgaggttgtactatattcatggtggtaagaggatctggttgtcatcttggttggaaactggtggttggccaattatgttgattccaattaccgtcaactacttcagaagaagaaaaactgcttctgctactgaaggtactactaagttcttccaaatcaagttgcctttgttcttggcttctgctttgattggtttgatgactggtttcgacgattacttgtatgcttatggtttggctagattgccagtttctacatccgctttgattattgcttctcaattggcttttactgctggtttcgcttacttgttggttagacaaaagttcacctcctactctgttaacgctatcgttttgttgactgttggtggtgctgttttggcattgcatacttcaggtgatagaccaaaaggtgagtccaacaaagaatacgttatgggtttcttgtttaccgttggtgcttctgcattatacggttttgttttgccattgatggaactgacctacaagaagtccagacaatctattacctactccttggtcttggaaatccaaatggttatgtctttgttcgccaccattttctgtactgttggcatgttgattaacaaggacttccaagctattccaagagaagctagaaagttcgaattgggtgaaaccatgtattacgtcttgttagttgttaccggtattacctggcaaacttttttcttgggtgccatcggtattatcttttgcgcttcttctttgctgtctgctatcgttattgctgtcttgttgccagttactgaaattttggccgttatcttctactccgaatctttcaaagctgaaaagggtgtttccctggttttgtctttatggggtttcgtttcttacttctacggtgatattaagagggctaagaaaaagaagccacaaaacccagaaaccgaaattccaactccaattgctggtccataa

SEQ ID NO: 575 - protein, 376 aa, Lactuca sativa
MMEKVTTTTTTTGTTAPMAAKVSPAAKKTLLILNCILLSIGNCGGPLIMRLYFHHGGNRVWLSSFLETAGWPFIVIVLIILYFHRRAAGKNGNNKRTTFIYMRPRLFFAVAFVGVITGFDDYLYAYGVARLPVSTSALIIASQLAFTAFFAYLLVKQKFTAYSVNAVVLLTVGAGVLALHTNSDRPEGETKKQYVMGFVLTVAAAVLYGFILPLIELTYNKAKQAITYTLVLEIQMVMCLFATIFCMVGMIINNDFKVIPREARDFDLGETKYYIIMCFSALIWQCFFLGAIGVIFCASSLLSGIIIAVLLPVTEVLAVVFYKEKFQAEKGVALVLSLWGFASYFYGEYKFMKKSKDNTQSTQQSMELAQANYSSV

SEQ ID NO: 576 - DNA, 1131 bp, Lactuca sativa
  source 1..1131: mol_type = other DNA
atgatggaaaaggttactaccaccactactacaactggtactactgctccaatggctgctaaagtttctccagctgctaaaaagaccttgttgattttgaactgcatcctgttgtctattggtaattgtggtggtccattgatcatgaggttgtactttcatcatggtggtaacagagtttggctgtcctcttttttggaaactgctggttggccttttatcgttatcgttttgatcatcttgtacttccatagacgtgctgctggtaaaaatggtaacaacaagagaactaccttcatctatatgaggccaaggttgttttttgctgttgctttcgttggtgttatcaccggttttgatgattacttgtatgcttacggtgttgccagattgccagtttctacttctgctttgattatcgcttctcaattggctttcactgctttctttgcttacttgttggtcaagcaaaagttcaccgcttactctgttaatgccgttgttttgttaactgttggtgctggtgttttggccttgcatacaaattctgatagaccagaaggtgagacaaaaaagcaatacgttatgggtttcgttttgacagttgctgctgctgtcttgtatggtttcattttgccattgatcgagctgacttacaacaaagctaagcaagctattacctacaccttggtcttggaaatccaaatggttatgtgtttgttcgccaccattttctgtatggttggtatgatcatcaacaacgacttcaaggttattccaagagaagccagagatttcgatttgggtgaaactaagtactacatcatcatgtgcttctccgctttgatttggcaatgttttttcttgggtgctatcggtgttattttctgcgcttcttctttgttgtccggtattatcattgctgttttgttgccagttaccgaagttttggctgtggttttctacaaagaaaagttccaagctgaaaagggtgttgccttggttttgtctttgtggggttttgcttcttacttttacggtgagtacaagttcatgaagaagtccaaggataacacccaatctacccaacaatctatggaattggctcaagctaactactcctctgtttga

SEQ ID NO: 577 - protein, 350 aa, Macleaya cordata
MNLVMKKRYLLLFNCILLAIGNTGGPLLLRLYFIHGGTRIWLSSWLETGGWPIMLLPLSISYLLHRFNNKGDENAANKFFTMTPPLFTASVVLGLLTGFDDYLYAYGVSLLPISTASLIISTHLAFTAGFALFIVKQKFTSYSVNSVVLLTIGAIVLGLHSSGDRPIGESDKQYYLGFFMTVAAAALNGFLLPMIELMYKKSKQAITYSLVIELQIVMCIFATLFCTVGMLVNKDFKAIPREGKEYKLGEAKYYTVLVASAIAWQLFFLGQIGVIFCATSLLSGVITAVLLPFTEILAVIFYHEKFKAEKGIALSLSFWGFISYFYGEFKESRNKKKQTSDSEQASSSLT

SEQ ID NO: 578 - DNA, 1053 bp, Macleaya cordata
  source 1..1053: mol_type = other DNA
atgaacctggtcatgaagaagaggtacttgttgttgttcaactgcattttgttggccattggtaatactggtggtcctttgttgttgaggttgtactttattcatggtggcaccagaatttggttgtcatcttggttggaaactggtggttggccaattatgttgttgccattgtctatctcttacctgttgcacaggtttaacaacaagggtgacgaaaatgctgctaacaagttctttactatgacccctcctttgttcactgcttctgttgttttgggtttgttgactggtttcgatgattacttgtatgcctacggtgtttccttgttgccaatttctactgcctccttgattatctctactcatttggcttttactgctggtttcgctttgtttatcgtcaagcaaaagttcacctcctactccgttaattccgttgtcttgttgactattggtgctatcgttttgggtctacattcttctggtgatagacctattggtgaatctgataagcaatattacctgggctttttcatgactgttgctgctgctgcattgaatggttttttgttgcctatgatcgagctgatgtacaagaaatccaagcaagctattacctactccttggtcattgaattgcaaatcgttatgtgcatcttcgctactttgttctgtactgttggtatgttggttaacaaggacttcaaggctattccaagagaaggtaaagagtacaaattgggcgaagctaagtactatactgttttggttgcttctgctattgcttggcagttgtttttcttgggtcaaatcggtgttattttctgcgctacttctttgttgtctggtgttattactgccgtcttgttgcctttcactgaaattttggctgttatcttctaccacgaaaagttcaaggctgaaaagggtattgctctgtctttgtctttttggggtttcatctcttacttctacggtgagttcaaagagtccagaaacaagaagaagcaaacctccgattctgaacaagcttcttcctctttgacttaa

SEQ ID NO: 579 - protein, 379 aa, Aquilegia coerulea
MDEEAIDARIKEEQVDEQQHKIKKKKKQIKLFLLLLNCALVCLGQVGGPLLIRLYYLHGGKRIWLTSWIQTAAFPLLLIPPLLSRARDRARAQSRVLSQSISPKDTKVLLNPKLLIASIVMGLIVGVDSYMFGLGLSYLPVSTSSLLMSTQLAFTAVFSLLLVRQKFTSYSINAVVLMTLGSVILAFHTNGDRPVGVSKGEYFVGFFMTLGAAALLGFMLPLIELSYSKACKVITYDLVLQVQFVVSMVATIFCTVAMVINKDFQAMTREAQEYGLGEGKYYMVITLAALAMQCMLAGNLGVVFCSTALFGGVLLALLLPIQQIFAVIFFHEKFNPEKGISLALSLWGFVSYFYGEHKLIKKQKQASLLTQQLHSTTGH

SEQ ID NO: 580 - DNA, 1140 bp, Aquilegia coerulea
  source 1..1140: mol_type = other DNA
atggatgaagaagctatcgacgccaggatcaaagaagaacaagttgacgaacaacagcacaagatcaaaaagaagaagaagcagatcaagctgttcctgttgttgttgaattgtgctttggtttgcttgggtcaagttggtggtccattattgattaggttgtactacttgcatggtggtaagagaatttggttgacctcttggattcaaactgctgcttttccattgctattgatcccaccattattgtccagagctagagatagagcaagagcacaatctagagttttgtcccaatctatttctccaaaggataccaaggttctgttgaacccaaagttgttgattgcctctatagtcatgggtttgatcgttggtgttgactcttatatgtttggtttgggcttgtcttacttgccagtttctacatcatctctgttgatgtctactcaattggcttttaccgctgtgttcagtttgttgttggttagacaaaagttcacctcctactccattaacgctgttgttttgatgacattgggttccgttattttggcttttcataccaatggtgatagaccagttggtgtttctaagggtgaatactttgttggtttcttcatgactttgggtgctgcagctttgttgggttttatgttgccattgatcgagctgtcttactctaaagcttgtaaggttatcacctacgacttggtcttgcaagttcaattcgttgtttctatggttgccaccattttctgtactgttgccatggttattaacaaggatttccaagctatgaccagagaagctcaagaatatggtttaggtgaaggcaagtactacatggttataactttggctgctttggctatgcaatgtatgttggctggtaatttgggtgttgttttctgttctactgctttgtttggtggtgttttgttggctttgttgctgccaatccaacaaattttcgctgttatcttcttccacgaaaaattcaacccagagaagggtatttctttggcattgtctttatggggcttcgtgtcatacttttacggtgaacataagctgatcaagaagcaaaagcaagcttctttgttgacccaacaattgcattctactaccggtcattga

SEQ ID NO: 581 - protein, 355 aa, Papaver nudicale
MNTCLLWFNGLLLAISSIGGPLLLRLYFIHGGKRIWLSSCLETAGFPVLFLPLWLSYFLKRRGVIKGDEGEKPSKLFTITRPLFIASAGIGLITGLDDYLYTYGVSLLPISTATIIMSTHLAFTAGFALVMVKQKFTSFSVNAVVLLTVGAILLGLHSNGDRPANESTKEYYLGFLITIAASVINGLMLPLVELMYMKSKQVITYSLVIELQIVISAFATLFCTIGMIVDNDFKVIPREGREYGLGEVNYYVVLVSSAIMWQMYFVGTVGVIFCSTSLLAGVIAVVVLPLTEILSVVFYHESFKAEKGIALFLSLWGFISYFWGELKGSRKAKKQISELEQDSSNSPTSLHILDY

SEQ ID NO: 582 - DNA, 1068 bp, Papaver nudicale
  source 1..1068: mol_type = other DNA
atgaacacgtgcttgttgtggttcaacggtttgttgttggccatttcttctattggtggtcctttgttgttaaggttgtacttcattcatggtggtaagaggatttggttgtcctcttgtttggaaactgctggttttccagttttgtttttgccattgtggctgtcctactttttgaagagaagaggtgttatcaagggtgacgaaggtgaaaaaccatctaagttgttcactatcaccaggcctttgtttattgcttctgctggtattggtttgatcaccggtttggatgattacttgtatacctacggtgtttccttgttgccaatttctactgccaccattattatgtctacccatttggcttttaccgctggttttgctttggttatggttaagcaaaagttcacctccttctctgttaacgctgttgttttgttgactgttggtgctatcttgttgggcttgcattctaatggtgatagaccagctaatgagtctaccaaagaatattacttgggcttcttgattaccattgctgcctctgttattaacggtttgatgctaccattggtcgagttgatgtacatgaagtccaagcaagttatcacctactcattggtcatcgaattgcaaatcgttatttctgctttcgctaccttgttctgcactattggtatgatcgttgataacgacttcaaggtcattccaagagaaggtagagaatatggtttgggtgaagttaactactacgtcgtcttggtttcttctgctattatgtggcaaatgtacttcgttggtacagttggtgttattttctgctctacttctttgttggctggtgtcattgctgttgttgttttaccattgaccgaaatcttgtccgttgttttctaccacgaatctttcaaagccgaaaagggtattgctctgtttttgtctttgtggggttttatctcttacttctggggtgaattgaagggttctagaaaagccaagaagcagatctctgaattggaacaagattcctctaactctccaacctccttgcatattttggactactga

SEQ ID NO: 583 - protein, 403 aa, Papaver bracteatum
MDIEAVSTNEGAATNYNHGGNHQSNLIVPNNHEDDLQSTANPITQKRVIKWKLLVLFCLFSASGNLGGPMLQRLYFIHGGGRKWFSSMIQTAGFPVLVAPLSYIYVKKINGPSYDSSWVFMMEPKLFIYSAIIGAVLGLANYMYSAGLFYLPVSTSSLLFSTQLAFTAIFAFIFVRQKFTFYSFNSVVLMTLGSVVLALNTSGDKPPGTTQQQYYLGFFLTLGGAALGGLCMPLIELAYGKSSKPITYSVVLQFQFVLSLFSTLVCMIGMAINNDFQVIPIEGRNFGLGERRYYFLIVATAIVWQLLNVGFLGIIYCTSSLFSGIFSTCLLPFSQVAATIAFNEKFTGQKGMSLALCLWGFVSYFVGEYKKTKNPHPIAYDDNAEELKDLDQLTDSNTMEGKP

SEQ ID NO: 584 - DNA, 1212 bp, Papaver bracteatum
  source 1..1212: mol_type = other DNA
atggacatcgaagctgtctctactaatgaaggtgctgctactaattacaatcatggtggtaaccatcagtccaacttgatcgttccaaacaatcatgaagatgacttgcaatctactgctaacccaatcactcaaaaaagggttatcaagtggaagctgttggttttgttctgtttgttttctgcctctggtaacttaggtggtccaatgttgcaaaggttgtactttatccatggtggtggtagaaagtggttctcctctatgattcaaactgctggttttccagttttggttgctccattgtcttacatctacgtcaagaaaatcaacggtccatcctatgattcctcttgggtttttatgatggaacccaagttgttcatctactccgctattattggtgccgttttgggtttagctaactacatgtattcagccggtttgttctatttgccagtttctacttcttccctgttgttctctacacaattggctttcactgctattttcgccttcattttcgtcagacaaaagttcaccttctacagcttcaactccgttgttttgatgactttgggttcagttgttttggctttgaatacctctggtgataagccaccaggtactactcaacaacaatattacttgggtttcttcttgacacttggtggtgctgctttaggtggtttgtgtatgccattgattgaattggcttacggcaaatcttccaagccaattacttattccgttgtcttgcaattccagttcgtcttgtctttgttttccactttggtctgcatgattggtatggccattaacaacgatttccaagtcattccaatcgagggtagaaattttggtttgggtgaaagacgttactacttcttgatagttgctactgctatcgtttggcagttgttgaatgttggtttcctgggtattatctactgcacctcttctttgttctccggtattttctctacttgcttgttgccattttctcaagttgctgctaccattgctttcaacgaaaagtttactggtcaaaagggtatgtccttggctttgtgtttgtggggttttgtttcttactttgtcggcgagtacaaaaagactaagaacccacatccaattgcctacgatgataatgctgaagaattgaaggatttggaccaattgactgactctaacactatggaaggtaagccatga

SEQ ID NO: 585 - protein, 386 aa, Papaver somniferum
MSALHIEMMEEGVLSPNIKPSTPSKNIKLSDDIHGDDDGDLKMINKQSLMEKWGLLVMYCIFAAVGFTGGPLLLRVYFLHGGSRKWLSSALQTAGFPILLLPLAILYAKRDKAAPQTNFFASPKLLLSSIFIGILLGVSNFMYSYGLSFLPVSTSSILLSTNLIFTALCALILVRQKFSPFSINAIVIMTLGSVLLGVGQNGDRPEGVTSLQYLLGFILSIGAAASGGLALPCIEVAYTKANQVMTYPIVLQYQFFMALSATVFSIIGMAVNKDFQAMQREADEFGLGKMEYYLVLVSSAVVWQISYIGTLGIIFYATSIFAGVVSAVLLPLTEIAAVIVFHEKFTGEKGMALAMSVWGFLSYFYGTYKESKIQTQIDSTKTSTRE

SEQ ID NO: 586 - DNA, 1161 bp, Papaver somniferum
  source 1..1161: mol_type = other DNA
atgtccgccttgcatatcgaaatgatggaagaaggtgttctgtccccaaatatcaaaccatctactccatccaagaacatcaagttgtccgatgatattcacggtgatgatgatggtgatctgaagatgattaacaagcagtccttgatggaaaagtggggtttgttggttatgtactgtatttttgctgctgttggttttactggtggtcctttgttgttgagagtttacttcttgcatggtggttccagaaaatggttgtcatctgctttacaaactgctggtttcccaatcttgttgttgccattggctatcttgtatgccaaaagagataaggctgctcctcaaactaatttctttgcttctccaaagctgctgctgtcctctattttcattggtattttgttgggcgtgtccaacttcatgtattcttacggtttgtctttcttgccagtctccacttcttcaattttgttgtccaccaacttgattttcaccgctttgtgtgctttgatcttggtcagacaaaagttctctccattctccattaacgccatcgttattatgactttgggttccgttttgttaggtgttggtcaaaatggtgatagacctgaaggtgttacttccttgcaatatttgttgggtttcatcttgtctattggtgctgctgcttctggtggtttggctttgccatgtattgaagttgcttacaccaaggccaatcaagttatgacttatccaatcgtcttgcagtaccaattcttcatggctttgtctgctaccgttttctctattattggtatggccgttaacaaggatttccaagctatgcaaagagaagctgacgaatttggtttgggtaagatggaatattacctggtcttggtttcttctgctgttgtttggcaaatttcctacattggtactttgggcattattttctacgccacttctattttcgctggtgttgtttcagctgttttgttgcctttgactgaaattgctgccgttatcgtttttcacgaaaagttcactggtgaaaaaggtatggctttggctatgtctgtttggggttttttgtcttacttctacggcacctacaaagagtctaagattcaaacccaaatcgactctactaagacttccactagagagtga

SEQ ID NO: 587 - protein, 368 aa, Aquilegia coerulea
MSSSLNVEGATSPKVDTKTRKTTNWPLLLLSCSFVAIGIIGGPLLSRLYFLHGGSRSWLSSCMQTAGFPILFLPLLSLFLQSRSQGESASVFFMEPKLFILSAIIGLLLGLDNFMYSLGLSYTPVSTSSILFSTQLAFLAVFAFFIVKQKFTPYSINAVILMTLGSVLLGLRSDGDRPAGVSNAQYWLGFILTLGSAAVLGLIWPLIELSYSKSKRPVNYGVVLQFQTNLAIFATLFSLTGMAINKDFQAMGKESNEYGLGNGMYYLVLAAGAVVWQLSFIGGLGVIFCANSLLNGVLSAVLLPITNIAAVIFYHENFNGLKAMSLVLCLWGFVSYFYGEYTMNKKLKNSPQTQLSDDSNKNEVLSPV

SEQ ID NO: 588 - DNA, 1107 bp, Aquilegia coerulea
  source 1..1107: mol_type = other DNA
atgtcctcctcattgaacgttgaaggtgctacttctccaaaagttgataccaagactagaaagactaccaactggcctttgttgttgttgagctgttcttttgttgccattggtattattggtggtccattgctgtctaggttgtatttcttgcatggtggttctagatcatggttgtcatcttgtatgcaaactgctggtttcccaattttgtttttgcccttgttgtccttgttcctgcaatctagatctcaaggtgaatctgcttctgttttcttcatggaacctaagctgtttatcttgtccgccattatcggtttgttgttaggtttggacaacttcatgtacagcttgggtttgtcttatactccagtttccacctcctctattttgttctctactcaattggctttcttggctgttttcgctttctttatcgtcaagcaaaagttcaccccatactccattaacgccgttattttgatgactttgggttccgttttgctgggtttgagatctgatggtgatagacctgctggtgtttctaatgctcaatattggttgggtttcatcttgacattgggttcagctgctgttttgggtttgatttggccattgattgagctgtcttactctaaatccaaaagaccagttaactacggtgtcgtcttgcaatttcaaactaacttggctatcttcgccaccttgttttctttgactggtatggctattaacaaggactttcaagccatgggcaaagaatctaacgaatacggtttaggtaacggcatgtactatttggttttggctgctggtgctgttgtttggcaattgtctttcattggtggtttgggtgttattttctgcgctaactctttgttgaacggtgttttgtcagctgtcttgttgccaattactaatattgctgccgttatcttctaccacgaaaactttaatggtctgaaggccatgtcattggttttgtgtttgtggggttttgtctcttacttttacggtgagtacaccatgaacaagaagttgaagaattctccacagactcaattgtccgatgactctaacaagaacgaagttttgtccccagtttaa

SEQ ID NO: 589 - protein, 370 aa, Papaver somniferum
MATSTMNIETPETIVPNQNGNSKPHVEETGKARNWPLIIINCALVFCGVIGGPLLMRLYYLHGGSRKWLSSCLQTAGFPVLLFPLNFLYIKSKSSTQKNDQSCSFFMEPMVFFWSAIIGIVFGVANFMYALGLSYLPVSTSTILFATQLCFTAFFAWLVVKQKFTAFIINAVIVMTLGSVLLGINTNGDRPIGVSKAQYLLGFLLTLAAAALTGLGMPFIELAFSKATRNITYSTLLQFQIIIGLFGTVLNVIGMLINKDFQAIPREADEFELGKGKYYMIIILTALTWQLSSVGFLGLISYTNALFNGIYTSVLVPFTEVGAVIFFHESFTGLKGMALALCLWGFSSYFYGEYKTMNKVLNGKMPQNGP

SEQ ID NO: 590 - DNA, 1113 bp, Papaver somniferum
  source 1..1113: mol_type = other DNA
atggctacctccaccatgaacattgaaactccagaaactatcgttccaaaccagaatggtaattccaagccacatgttgaagaaactggtaaggctagaaattggccattgattattatcaactgcgccttggttttctgcggtgttattggtggtccattattgatgaggttgtactacttgcatggtggttctagaaaatggttgtcatcttgtttacaaaccgctggttttccagttttgttgttcccattgaatttcttgtacatcaagtccaagtcctccactcaaaagaacgatcaatcttgctcattcttcatggaacccatggtttttttctggtccgctattattggtatcgttttcggtgttgctaacttcatgtatgctttgggtttgtcttacttgccagtttctacttccactattttgttcgctacccaattgtgtttcactgctttttttgcttggttggtcgtcaagcaaaagtttaccgctttcattattaacgccgttatcgttatgaccttgggttctgttttgttgggtattaacactaacggtgatagaccaatcggtgtttctaaagctcaatacttgttgggtttcttgttgactttggctgctgctgctttgactggtttgggtatgccttttattgaattggctttctctaaggccaccagaaacattacttactctaccttgttgcagttccagatcattattggtttgttcggtactgtcttgaacgtcattggtatgttgattaacaaggacttccaagctattccaagagaagctgatgaattcgaactaggtaaaggcaagtactacatgatcattatcttgaccgctttgacctggcaattatcttctgttggttttttgggcttgatctcttacactaacgctttgtttaacggcatctacacctctgttttggttccattcactgaagttggtgccgttattttcttccatgaatctttcacaggtttgaaaggtatggctttggctttatgtttgtggggtttttcctcttacttttacggtgagtacaagacgatgaacaaggttttgaatggtaagatgccacaaaacggtccatga

SEQ ID NO: 591 - protein, 373 aa, Papaver somniferum
MATSAMDIETPETLVPNQNGNSKTKPIKTRNWLLILINCALVSCGSIGGPLLMRLYYLHGGNRKWFSSFIASAGFPILIFPLMFHFFRSESSTDKIWSCFWLEHKLFLRGVILGILYGLVTFMYALGLSYIPVSTSSLLMATQLCFIAFFSWLIVKQKFTAFIINAVVVMTLGSVLLGINTNGDRPVGVTKSQYLLGFLLTLAAAALAGLIMPLIELSFSKAINNLTYSSLLQFQFILSLSSTIVCVIGMLANKDFQAIPREANDFELGKARYYIIMVVTAIVWQLSGVGTVGVIFYTSALFNGILGSVLIPLTGVAAVIFYHESFTGLKGMALALCLWGFCSYFYGEYKMTKKVIVKVENEPKRLLGDQEEP

SEQ ID NO: 592 - DNA, 1122 bp, Papaver somniferum
  source 1..1122: mol_type = other DNA
atggctacctccgctatggatattgaaactccagaaactttggttccaaaccagaatggtaactctaagactaagccaatcaagaccagaaactggttgttgattttgattaactgcgccttggtttcctgtggttctattggtggtccattattgatgaggttgtactacttgcatggtggtaatagaaagtggttctcctcttttattgcttctgctggtttcccaattctgatctttccattgatgttccatttcttcaggtccgaatcttccactgataagatttggtcttgtttttggttggagcacaagttgtttttgagaggtgttatcttgggtatcttgtacggtttggttactttcatgtatgccttgggtttgtcctatattccagtttctacttcctctttgttgatggctactcagttgtgtttcattgctttcttctcttggttgatcgtcaagcaaaagttcaccgcctttattatcaacgccgttgttgttatgactttgggttctgttttgttgggtattaacaccaatggtgatagacctgttggtgttactaagtcccaatacttgttgggtttcttgttgactttggctgctgctgctttggctggtttgattatgccattgattgagctgtctttctcaaaggccattaacaacttgacctactcgtctttgttgcagttccaattcatcctgtctttgtcctctactatcgtttgcgttattggtatgttggctaacaaggatttccaagccattcctagagaagctaacgatttcgaattgggtaaagccaggtactacatcattatggttgttactgctatcgtctggcaattgtctggtgttggtactgtcggtgttattttctatacttctgctttgttcaacggcatcttaggttcagttttgattccattaactggtgttgctgccgttatcttctaccatgaatctttcactggtttgaaaggtatggctttggctttgtgtttgtggggtttttgttcttacttttacggcgagtacaagatgactaagaaggttatcgttaaggtcgaaaacgagccaaaaagattattgggtgatcaagaggaaccctaa

SEQ ID NO: 593 - protein, 370 aa, Prunus yedoensis var. nudiflora
MHMEANHEEKRNAALKRALLILSCVLLSIGACGGPLIMRLYFIHGGKRVWLSSWLETGGWPIIFIPIALAYYHRRTTEGPSTKLFFMKLPLFIASAVIGLLTGIDDYLYAYGVARLPVSTASLITAAHLAFTALFAFLLVKQKFTSYSINCIFLLTIGAAVLGLNTSADRPKGESDKQYIAGFMMTLSAAALYGFVLPLVELTYKKAKQTITYALVLEVQLVMCLFATIFCTVGMLINNDFKVIPREARNFELGESKYYVVLVFSAIVWQGFFLGAIGIIFCASSLLSGIVIAVLLPVTEILAVIFYHEKFQAEKGVALALSLWGFVSYFYGERKYSKQKESEMKNEKEKEVEIGKKDTPETAEVSQLDP

SEQ ID NO: 594 - DNA, 1113 bp, Prunus yedoensis var. nudiflora
  source 1..1113: mol_type = other DNA
atgcacatggaagccaaccacgaagaaaaaagaaatgctgctttgaagagagccctgttgattttgtcttgtgtcttgttgtctattggtgcttgtggtggtccattgatcatgaggttgtactttattcatggtggtaagagagtctggttgtcatcttggttggaaactggtggttggccaattatctttattccaattgctttggcctactaccatagaagaactactgaaggtccatctaccaagctgttttttatgaagttgcctctgttcattgcctccgctgttattggtttgttgactggtattgatgattacttgtacgcttacggtgttgctagattgccagtttctactgcttctttgattactgctgctcatttggcttttactgctttgtttgctttcttgttggtcaagcaaaagttcacctcctactccattaactgcatctttttgttgacaattggtgccgctgttttgggtttaaatacttctgctgatagaccaaagggtgaatctgataagcagtacattgctggtttcatgatgactttgtctgctgctgcattatacggttttgttttgccattggttgagctgacttacaagaaggctaagcaaactattacctacgccttggttttggaagttcaattggttatgtgtttgttcgccaccattttctgtactgttggcatgttgattaacaacgacttcaaggttattccaagggaagctagaaatttcgaattgggtgaatccaagtactacgtcgttttggttttttctgctatagtctggcaaggtttcttcttgggtgctattggtattatcttctgcgcttcttctttgttgtccggtatagttattgctgttttgttgccagttaccgaaattttggccgttattttctaccacgaaaagttccaagctgaaaagggtgttgctttagctttgtctttgtggggtttcgtttcttacttttacggtgagagaaagtactccaagcagaaagaatctgaaatgaagaacgaaaaagagaaagaggtcgagatcggtaaaaaggatactccagaaactgctgaagtttcccaattggatccatga

SEQ ID NO: 595 - protein, 353 aa, Macleaya cordata
MDKEQQRDAAMKRALLIFNCVLLAIGNCGGPLVMRLYFVHGGKRVWLSSWLETGGWPIIFIPLAISYFHRRRAAAGESTTLIFMKPRLFLAATVIGVITGFDDYLYAYGVARLPVSTSALIIACQLAFTAVFAYLLVKQKFTSYSINAVVLMTIGGAVLALHTSGDRPAGESTKAYVAGFLMTVAAALLYGFVLPLVELTYKKAKQQITYTLVLEIQLVMSLFATLVCTVGMLINNDFQVIPREAREFGLGETKYYVVLAFSAIIWQGFFLGAIGVIFCSSSLFSGIVIAVLLPVTEILAVVIFSEKFQAEKGVSLALNLWGFVSYFYGEIKHDKKRKLELQNAESACQITSV

SEQ ID NO: 596 - DNA, 1062 bp, Macleaya cordata
  source 1..1062: mol_type = other DNA
atggacaaagaacaacaaagggatgctgctatgaagagagctttgttgattttcaactgcgttttgttggctattggtaattgtggtggtccattggttatgaggttgtactttgttcatggtggtaagagagtttggttgtcatcttggttggaaactggtggttggccaattatctttattccattggccatctcttacttccatagacgtagagctgctgctggtgaatctactactttgatttttatgaagcccaggttgttcttggctgctactgttattggtgttattaccggtttcgatgattacttgtatgcttacggtgttgctagattgccagtttctacttccgctttgattattgcttgtcaattggctttcactgctgttttcgcttacttgttggttaagcaaaagttcacctcctactccattaacgctgttgttttgatgacaattggtggtgctgttttggcattgcatacttcaggtgatagaccagccggtgaatcaactaaggcttatgttgctggtttcttgatgactgttgctgctgctttgttgtacggttttgttttgccattggttgagttgacttacaagaaggccaagcaacaaattacctacaccttggttttggaaatccagttggtcatgtctttgtttgctactttggtatgtaccgtcggcatgttgattaacaacgatttccaagttattcccagggaagctagagaatttggtttgggtgaaactaagtactacgttgtcttggctttttccgccattatttggcaaggttttttcttgggtgctatcggtgttattttctgctcatcttctttgttctccggtatcgttattgcagttttgttgccagttaccgaaattttggctgtcgttatcttctccgaaaagttccaagctgaaaagggtgtttctttggctttgaatttgtggggtttcgtgtcttacttttacggtgaaatcaagcacgacaagaagagaaagttggaattgcaaaatgctgaatccgcctgccaaattacttctgtttaa

SEQ ID NO: 597 - protein, 375 aa, Helianthus annuus
MNNHKQNTTTNTTAGTTAPATAKVSPAAKNTLLILNCVLLSIGNCGGPLIMRLYFLHGGERVWLSSFLETAGWPVIILVLAVLYFDRRRKNTNTKTTFVYMRPRLFFAVAVIGILTGLDDYLYAYGVARLPVSTSSLIIASQLGFTAFFAYVLVKQKFTPYSVNAVVLLTVGAAVLALHTNGDRPEGESKKAYVMGFVMTVGASLLYGFVLPLIELTYNKAKQEITYTLVLEIQMVMCLFATIFCAVGMFINNDFKAIPVEATEFGLGETKYYVILCASALIWQCFFLGAIGVIFCASSLLSGIIIAVLLPVIEVLAVVFYKENFQAEKGVALVLSLWGFASYFYGEYKFAKKLKEKTRSSQQSMELGQAYISSV

SEQ ID NO: 598 - DNA, 1128 bp, Helianthus annuus
  source 1..1128: mol_type = other DNA
atgaacaaccacaagcaaaacactactaccaacactactgctggtactactgctccagctactgctaaagtttctccagctgctaagaacaccttgttgattttgaactgcgtcttgttgtctattggtaattgtggtggtccattgatcatgaggttgtatttcttgcatggtggtgaaagagtttggctgtcatcttttttggaaactgctggttggccagttatcattttggttttagctgtcttgtacttcgacagaagaagaaagaacactaacactaagaccaccttcgtttacatgaggccaagattattctttgccgttgccgttattggtattttgactggtttggatgattacttgtacgcttatggtgttgctagattgccagtttctacctcctctttgattattgcttctcaattgggtttcaccgctttctttgcttacgttttggttaagcaaaagttcaccccatactctgttaacgctgttgttttgttgactgttggtgctgctgttttggcattgcatacaaatggtgatagaccagaaggtgaatccaaaaaggcttacgttatgggtttcgttatgacagttggtgcatctttgttgtacggttttgttttgccattgatcgagttgacttacaacaaggccaagcaagaaattacctacaccttggttttggaaatccaaatggttatgtgtttgttcgccaccattttttgtgctgttggtatgttcatcaacaacgactttaaggccattccagttgaagctactgaatttggtttgggtgaaactaagtactacgttattttgtgcgcttccgctttgatttggcaatgttttttcttgggtgccatcggtgttattttctgtgcttcttctttgctgtccggtattatcattgctgttctgttgccagtcattgaagttttggcagtcgttttctacaaagaaaacttccaagctgaaaagggtgttgctttggttttgtctttgtggggttttgcttcttacttttacggtgagtacaagttcgccaagaagttgaaagaaaagaccagatcctctcagcagtctatggaattgggtcaagcttacatttcctccgtttga

SEQ ID NO: 599 - protein, 342 aa, Carica papaya
MEAAMKRALLVLNCILLFIGGSGGPLLTRLYFIHGGSRLWFSSWLQTGGFPIFLLPLSIAYIQHHRRNPSPGNRFFIGPRLFIASVIIGILTGLDDFLMANGMARLPISTSALISATQLAFTAGFAFLLVRQKFTAYSVNALVLLTIGAAVLAMHGSSDRPEGESSKEYMFGFVMMIGAAALYGFIMPFLELVYAKAGQEITYAVVMQIQMVICVFATGFSTVGMVINNDFKVIPREAREFEIGETKYYLVVVWSAVAWQFSFLGVVGIVFCASSLLSGVMVSLLIPVTEVLGVIFLDEKFRPEKGVALALSIWGFISYFYGEARTLKKQKHVDQDTEMQQV

SEQ ID NO: 600 - DNA, 1029 bp, Carica papaya
  source 1..1029: mol_type = other DNA
atggaagctgctatgaagagagccttgttggttttgaactgcatcttgttgtttatcggtggttctggtggtccattattgactaggttgtactttattcatggtggctctagattgtggttctcttcttggttgcaaactggtggttttccaattttcttgctgccattgtccattgcctacatccaacatcatagaagaaatccatctccaggtaacagattctttattggtccaaggttgttcattgcctccgttattattggtattttgaccggtttggacgatttcttgatggctaatggtatggctagattgccaatttctacctccgctttgatttctgctactcaattggcttttactgctggttttgcctttttgttggtcagacaaaagttcaccgcttactctgttaatgccttggttttgttgactattggtgctgctgttttggctatgcatggttcttcagatagaccagaaggtgaatcttctaaagagtacatgttcggtttcgtcatgatgattggtgcagctgccttatatggtttcattatgccattcttggaactggtttatgctaaggctggtcaagaaattacttacgccgttgttatgcaaatccaaatggttatttgtgttttcgccactggtttctctactgttggtatggttattaacaacgacttcaaggtcattccaagagaagctagagaattcgaaatcggtgaaacgaagtactacttggttgttgtttggtcagctgttgcttggcaattttcatttttgggtgttgtcggtatcgttttctgtgcttcttctttgttgtctggtgtcatggtgtctttgttgattccagttactgaagtcttgggtgttatcttcttggacgaaaaattcagaccagaaaagggtgttgctttggctttgtctatttggggtttcatctcttacttttacggtgaagctaggaccctgaaaaaacaaaaacacgttgatcaagacaccgaaatgcaacaagtttaa

SEQ ID NO: 601 - protein, 341 aa, Papaver radicatum
MKKSLMLFNTILLGIGATGGPLLLRLYFVRGGKRIWLSSALGSAGWPVLILPLSLSYFFNRGGRGGDKRWYKFYTITPPLIVFSAFIGIILGSNDYLYTHGISLLPVSTSTLIMSTHLAFTAGFAFVIVKHKFTPYSINAVVLLTVGAVLLGLNSSGDKPVNQSKKDYYLGFFLTVGASVISGFLFPLSELMYMKAKERLTYSLVIEMQIVTAVVASLFCIVGMIVNNDFQAIPREGRDYELGEVKYYVVLVAIAIMWQIYFVGTAGVIFCSTSLYAGIITAVILPVTEILSVVFYHESFKSEKGLALFLSCWGFISYLYGDYKENLKLKKAQKQSSEMEL

SEQ ID NO: 602 - DNA, 1026 bp, Papaver radicatum
  source 1..1026: mol_type = other DNA
atgaagaaatccctgatgctgttcaacaccatcttgttaggtattggtgctactggtggtcctttgttgttgagattatactttgttagaggtggcaagaggatctggttatcttctgctttgggttctgctggttggccagttttgattttgccattgtctctgtcctacttttttaacagaggtggtagaggcggtgataagagatggtacaaattctacactattaccccaccactgatcgttttctctgctttcattggtattatcttgggctccaacgattacttgtacacccatggtatttctttgttgccagtttctacctccaccttgattatgtctactcatttggcttttactgctggtttcgctttcgttatcgttaagcacaagtttaccccatactccattaacgctgttgttttgttgactgttggtgcagttttgttgggtttgaattcttctggtgataagccagttaaccagtccaaaaaggattactacttgggtttctttttaaccgttggtgcctctgttatttccggttttttgtttccattgtccgagctgatgtacatgaaggctaaagaaagattgacctactccttggtcatcgaaatgcaaatagttactgctgttgttgcctctttgttctgtatagttggtatgatcgttaacaacgacttccaagctattccaagagaaggtagagattacgaattgggtgaagttaagtactacgttgttttggttgccattgccattatgtggcaaatctactttgttggtacagccggtgttattttctgttctacttcattatacgccggtatcattaccgcagttattttgccagttaccgaaatcttgtccgttgttttctaccacgaatccttcaagtctgaaaaaggtttggctttgttcttgtcttgctggggttttatctcttacttgtatggtgactacaaagagaacctgaagttgaagaaagcccaaaagcaatcttccgagatggaattgtga

SEQ ID NO: 603 - protein, 384 aa, Sanguinaria canadensis
MGRRSRRAAPPNGETTQNEKSKTQIESSPTSCRTKNWPLIILNAAIMTTGVIGGPLLMRLYYIHGGNRRWLSSCVQTAGFPILIIPLTFLYFFHSKKISHHHNSSSSSSSFWMEPKLFVSSSLIGILFGLTNFMYSLGLSYIPISTSSLLYATQLVFVAFFAWFIVKQQFTAFSINSVVLMTLGSILLGIKTDGDRPVGVTKAEYLLGFLLTLGSAAVVGFILPMVELSYSKATRTVNYTTVLQYQFNLALFSTIFNSIGMLINKDFQAIPREASEFELGKTMYYVVLIGGAITWQFASIGGLGVILYTSSLFSGILSSVLLPFTEIAAVIVYHERFTGLKGMALALCFWGFTSYFYGEYKLMMNDTKTKPPEKNIPDDPCTSV

SEQ ID NO: 604 - DNA, 1155 bp, Sanguinaria canadensis
  source 1..1155: mol_type = other DNA
atgggcagaagatctagaagggctgctccaccaaatggtgaaactactcaaaacgaaaagtctaagacccagatcgaatcttctccaacttcttgtagaactaagaactggccattgattattttgaacgctgctattatgaccaccggtgttattggtggtccattgctaatgaggttgtactatattcatggtggtaacagaaggtggttgtcctcttgtgttcaaactgctggtttcccaattttgattatccctttgaccttcctgtacttcttccactctaagaagatctcccatcatcacaactcttccagttcttcatcttcattttggatggaacccaagctgttcgtttcctcttctttgattggtatcttgttcggtttgaccaacttcatgtattccttgggtttgagctatatcccaatctccacttcttctttgttgtacgctactcaattggttttcgttgctttcttcgcttggtttatcgtcaagcaacaattcactgccttctccattaactccgttgttttgatgactttgggctccattttgttgggtattaagactgatggtgatagaccagttggtgttactaaggctgaatacttgttgggtttcttgttgactttaggttctgctgctgttgttggtttcattttgccaatggttgagctgtcttactctaaggctactagaactgttaactacactaccgtcttgcaataccaattcaacttggctttgttctccaccatcttcaactctattggcatgttgattaacaaggacttccaagctattccaagagaagcctctgaatttgaattgggtaagaccatgtattacgtcgttttaattggtggtgctatcacttggcaattcgcttctataggtggtttgggtgttatcttgtacacctcttcattattctccggcatcttgtcatctgttttgttgccattcactgaaattgctgccgttatcgtttatcacgaaagattcactggtttgaaaggtatggctttggcattgtgtttttggggttttacctcttacttttacggcgagtacaagttgatgatgaatgataccaaaactaagccaccagagaagaacattccagatgatccatgtacctctgtctga

SEQ ID NO: 605 - protein, 378 aa, Aquilegia coerulea
MSSSIHLESVEEGTQTPKIATQMQNKRKLTNWPLLLLSCTFVAIGIIGGPLVSRLYYIHGGKRRWLSSCMQTAGFPILFVPLLSLFLQSKSQGVSPSLFFMEPKLFVLSGLIGLLLGLDNFLYSLGLSYTPVSTSSILFATQLAFLAVFAFFMVKQKFTAYSINSVILMTLGSVLLGLRTSGDRPAGVSDGQYWLGFFLTLASAALLGLIWPLIELSYGKAKRPVNYGIVLQFQTNLAIFATLFSLTGMVINKDFQAMGREANEYALGNNMYYLVLAAIAVVWQLSFIGGLGVIFCANSLLNGVLSAVLLPITNVAAVIFYHENFNGLKAMSLVLCLWGFVSYFYGEYKMSQMNKKLENSTKIEHEGDSAPNAALSSV

SEQ ID NO: 606 - DNA, 1137 bp, Aquilegia coerulea
  source 1..1137: mol_type = other DNA
atgtcctcctccatccacttggaatctgttgaagaaggtactcaaactccaaagattgctacccaaatgcagaacaagagaaagttgactaattggcccttgctgttgttgtcttgtacttttgttgccattggtattatcggtggtccattggtttctaggttgtactatattcatggtggtaagagaaggtggttgtcctcttgtatgcaaactgctggttttccaattttgttcgtcccattgctatccttgttcttgcaatctaaatcccaaggtgtttccccatctttgtttttcatggaacctaagctgttcgtcttgtctggtttgattggtttgttgttgggtctagacaacttcttgtattccttgggtttgtcttataccccagtttccacttcctctattttgtttgctactcaattggctttcttggctgttttcgctttctttatggtcaagcaaaagttcaccgcctactccattaactccgttattttgatgactttgggctccgttttgttgggtttgagaacatctggtgatagacctgctggtgtttctgatggtcaatattggttgggtttcttcttgactttggcttctgctgctttattgggtttaatttggccattgatcgagttgtcttacggtaaagctaaaagaccagttaactacggtatcgtcttgcaattccaaactaacttggctatcttcgccaccttgttttctttgactggtatggttatcaacaaggactttcaagctatgggtagagaagctaatgaatacgctttgggtaacaacatgtactacttggttttggctgctattgcagttgtttggcaattgtcttttattggtggtttgggtgttattttctgcgccaattctttgttgaacggtgttttgtctgctgtcttgttgccaattactaatgttgctgctgttatcttctaccacgaaaactttaatggtctgaaggccatgtctttggttttgtgtttgtggggttttgtctcttacttttacggtgagtacaagatgtcccagatgaacaaaaagttggagaactccaccaagatcgaacatgaaggtgattctgctccaaatgctgctttgtcatctgtttga

SEQ ID NO: 607 - protein, 375 aa, Papaver somniferum
MSIETPETLGRNQNGNSKTDIEKPIKTRNWLIIIINCALVSCGAIGGPLLMRLYYLHGGSRKWLSSCLQTAGFPILIFPLIFLYIKSKSSTPNKDQTSSFYIEPKLFLSGIAIGILFGFANFMYALGLSYLPVSTSSILFATQLCFTAFFAWLIVKQKFSAFIINAVVVMTLGSVLLGINTNGDRPIGVSKAQYLIGFLMTLAAAALTGLTMPLIELAFSKATRRVTYSSLLQLQFTYSLFATGLNVIGMLINKDFQAIPREAEVFEFGKRKYYMIIVLTAITWQLATLGFFGLILYTSALFNGIYGSLLFPFTGVAAVIFYHESFTGLKGMALALCLWGFSSYFYGEYKMMNKVNNNERHEKIEEVENDPKSTV

SEQ ID NO: 608 - DNA, 1128 bp, Papaver somniferum
  source 1..1128: mol_type = other DNA
atgtccatcgaaactccagaaaccttgggtagaaatcaaaacggtaactccaagaccgatatcgaaaagccaatcaagactagaaactggctgattatcattatcaactgcgctttggtttcttgcggtgctattggtggtccattattgatgagactgtattacttgcatggtggttccagaaaatggttgtcctcttgtttacaaactgctggtttcccaattctgatcttcccattgattttcttgtacatcaagtccaagtcctccactccaaacaaagatcaaacttcctcattctacatcgagcccaagttgtttttgtccggtattgcaattggtatcttgttcggttttgccaactttatgtatgccttgggtttgtcttatttgccagtctctacttcctctattttgttcgctactcaattgtgtttcaccgctttttttgcttggttgatcgtcaagcaaaagttctccgctttcattattaacgccgttgttgttatgactttgggctctgttttgttgggtattaacactaatggtgacagaccaatcggtgtttctaaagcccaatatttgatcggtttcttgatgactttagctgctgctgctttgactggtttgactatgccattgattgaattggctttctctaaggctactagaagggttacttactcctctttgttgcaactgcaattcacctattccttgtttgctaccggtttgaacgttatcggtatgttgattaacaaggacttccaagccattccaagagaagctgaagtttttgaattcggcaagagaaagtactacatgatcatcgttttgaccgctattacttggcaattggctactttgggttttttcggcttgatcttgtatacctctgctttgtttaatggcatctacggcagtttgttgtttccattcactggtgttgctgccgttattttctaccatgaatctttcacaggtttgaaaggtatggctttggctttgtgtttgtggggtttttcttcttacttttacggcgagtacaagatgatgaacaaggtcaacaacaatgagaggcacgaaaagattgaagaagttgaaaacgatccaaagtccaccgtttga

SEQ ID NO: 609 - protein, 365 aa, Malus domestica
METDHVEKRNAAIKKLLLVISCILLSIGTAGGPLVMRLYFIHGGKRVWLSSWLETGGWPITFIPLVMAYYHRRKTEGASTKIIFMKLPLFIASAVIGVLTGLDDYLYAYGVARLPVSTSALIIAGQLAFTALFAFILVKQKFTSFSINAVVLLTIGAAVLGLNTSSDRPEGESNKEYIAGFFMTVAAAALYGFVLPLIELTYKKAKQTITYALVLEIQLVMCLFATLFCTVGMFIDNDFKVIPREARNFGLGETSYYVVLVFSAIVWQGFFLGAVGVIFCASSLFSGILIAVLLPVTEVLAVIFYHEKFQAVKGVSLALSLWGFVSYFYGEIKHSKQEEKGKQAEISEKKKETPEATQVPQQLEP

SEQ ID NO: 610 - DNA, 1098 bp, Malus domestica
  source 1..1098: mol_type = other DNA
atggaaaccgatcacgtcgaaaagagaaacgctgctattaagaagttgctgttggttatctcctgcatcttgttgtctattggtactgctggtggtccattggttatgaggttgtactttattcatggtggtaagagagtctggttgtcatcttggttggaaactggtggttggccaattacttttattcctttggttatggcctactaccatagaagaaaaactgaaggtgcttccaccaagatcattttcatgaagttgcctttgttcattgcctccgctgttattggtgttttgactggtttggatgattacttgtatgcttacggtgttgctagattgccagtttctacttccgctttgattattgctggtcaattggcttttactgctttgttcgctttcattttggtcaagcaaaagttcacctccttctccattaacgctgttgttttgttaactattggtgctgcagttttgggtttgaacacttcttctgatagaccagaaggtgagtctaacaaagagtacattgctggtttcttcatgactgttgctgctgctgcattatacggttttgttttgccattgatcgagctgacttacaagaaagctaagcaaactattacctacgccttggtcttggaaattcaattggtcatgtgtttgttcgccactttgttctgtactgttggtatgttcatcgacaacgatttcaaggttattccaagagaagctaggaatttcggtttgggtgaaacttcttactacgtcgttttggttttctctgctatagtttggcaaggttttttcttgggtgccgttggtgttattttctgtgcttcttctttgttctccggtattttgattgctgttttgttgccagttaccgaagttttggctgttatcttttaccacgaaaagttccaagctgttaagggtgtttctttggctttgtctttgtggggtttcgtttcttatttctacggtgaaatcaagcactccaagcaagaagaaaagggtaagcaagctgaaatctccgaaaagaagaaagaaactccagaagctactcaagtcccacaacaattggaaccataa

SEQ ID NO: 611 - protein, 352 aa, Cinnamomum micranthum f. kanehirae
MKRALLIFNCLLLAVGNCGGPLIMRLYFVHGGKRVWLSSWLETGGWPMIFIPLIFSYFHRRRSAALESSESANKTKMIFMKPRLFLASAVIGIITGFDDYLYAYGVARLPVSTSALIIATQLAFTAGFAYLLVKQKFTSYSINAVVLITIGGAVLALHTSGDRPAGVSTKQYIAGFLMTLAAAALYGFVLPLVELTYKKSRQRITYTLVLEIQLVLSFFATVVCTVGMLANNDFKVIPREAAEFGLGETAYYVVLACSAIAWQGFFLGAIGVIFSSSSLFSGIVIAVLLPVTEILAVIIFKEKFKAEKGVSLALNLWGFVSYFYGDIKNNKTNNLQLQLHKTEATATQISSV

SEQ ID NO: 612 - DNA, 1059 bp, Cinnamomum micranthum f. kanehirae
  source 1..1059: mol_type = other DNA
atgaagagggccttgttgatcttcaactgtttgttgttggctgttggtaattgtggtggtccattgattatgaggttgtactttgttcatggtggtaagagagtttggttgtcatcttggttggaaactggtggttggccaatgatttttatcccattgatcttctcgtacttccacagaagaagatctgctgctttggaatcttctgaatctgctaacaagacgaagatgattttcatgaagccaaggttgtttttggcctctgctgttattggtattatcaccggttttgacgattacttgtatgcttatggtgttgccagattgccagtttctacttccgctttgattattgctactcaattggcttttactgctggtttcgcttacttgttggttaagcaaaagttcacctcctactccattaacgccgttgttttgattactattggtggtgctgttttggccttgcatacttctggtgatagacctgctggtgtttctactaagcagtatattgctggttttttgatgactttggctgctgctgcattatacggttttgttttgccattggttgagctgacttacaagaagtccagacaaagaattacctacaccttggtcttggaaatccaattggttttgtctttcttcgctactgttgtctgtactgttggtatgttggcaaacaacgatttcaaggttattccaagagaagctgctgaatttggtttgggtgaaactgcttactatgttgtcttggcttgttctgctattgcttggcaaggttttttcttgggtgctattggtgtgatcttcagctcatcttctttgttctctggtatcgttattgccgttttgttgccagttactgaaattttggccgtcatcatcttcaaagaaaagttcaaggctgaaaagggtgtctctttggctttgaatttgtggggtttcgtttcttacttctacggtgatatcaagaacaacaagaccaacaacttgcaactacaattgcataagactgaagctactgctacccaaatctcttctgtttga

SEQ ID NO: 613 - protein, 369 aa, Artemisia annua
MDNHKSATTTTNTEPMTAKVSPAAKKTLLILNCILLSVGICGGPLIMRLYFVHGGNRVWLSSFLETAGWPFIVPVLIVLFFIRRNSNTKTTTIYMRPRLFFATAFVGILTGLDDYLYAYGLARLPVSTSSLIIASQLGFTAFFAYLLVKQKFTPYSINAVVLLTVGAGVLALHTSSDRPKGESKKEYMLGFVMTVGAALLYGFILPLVELTYNKAKQAITYTLVLEIQMVMCLFATIFCTVGMIVNNDFKVIPREATEFGLGKTNYYTILCASALTWQCFFLGAIGVIFCASSLLSGIIIAVALPVTEVLAVVFFSEKFQAEKGVALVLSLWGFASYFYGEYKSTKKPKDINESTRQTMELPQSDYSRV

SEQ ID NO: 614 - DNA, 1110 bp, Artemisia annua
  source 1..1110: mol_type = other DNA
atggacaaccataagtctgctactactaccactaatactgaacctatgactgctaaagtttctccagctgctaaaaagaccttgttgattttgaactgcatcttgttgtccgttggtatttgtggtggtccattgattatgaggttgtactttgttcatggtggtaacagagtttggctgtcctcttttttggaaactgctggttggccttttatcgttccagttttgatcgttctgttcttcatcagaagaaactctaacactaagaccaccactatctatatgaggccaagattattcttcgctactgcttttgttggtatcttgactggtttggatgattacttgtatgcttacggtttggctagattgccagtttctacttcctctttgattatcgcttctcaattgggtttcactgctttctttgcttacttgttggtcaagcaaaagttcaccccatactctattaacgccgttgttttgttgactgttggtgctggtgttttggcattgcatacttcatctgatagaccaaagggtgagtctaagaaagagtacatgttgggtttcgttatgacagttggtgcagctttgttgtacggtttcattttgccattggttgagttgacttacaacaaggctaagcaagctattacctacaccttggttttggaaatccaaatggttatgtgtttgttcgccaccattttctgtactgttggtatgatcgttaacaacgacttcaaggttattccaagagaagctactgaattcggtttgggtaagactaactactataccattttgtgtgcctctgctttgacttggcaatgttttttcttgggtgctatcggtgttattttctgcgcttcttctttgttgtctggtatcattatagctgttgctttgccagttactgaagttttggctgttgttttcttcagcgaaaagttccaagctgaaaaaggtgttgcattggttttgtctttgtggggttttgcttcttacttttacggtgagtacaagtctaccaaaaagccaaaggatatcaacgaatccactagacaaactatggaattgccacaatccgattactccagagtttga

SEQ ID NO: 615 - protein, 353 aa, Capsicum chinense
MEPQVSSRMKKLLLVINCIILAVGTCGGPLIMRLYFIKGGKRIWLSSWLQTAAWPINFIPLVISYIYRRKSNNNNTTKLILMTPQILVVTIGIGILQGYANYFYAYGIAKLPVSTSGLLFATQLAFTAFFAFLIVKLKFTSYSVNSVFLLTIGAVVLALRSSGDQPEGEPKKEYILGFIMTLAAAALSGLIFPLVELIYKKAQQAITYTLVLEFQTVYCFIATVLATIGMIINKDFQAISREANSFELGESKYYIVIVWSAIVLQFYFLGVIGVIYSASSLVSGILISVLLPATEVLAVFLYGEKFNAEKGISLALSLWGFASYFYGDYKENKKRENNQSQETEMTDKSNCTP

SEQ ID NO: 616 - DNA, 1062 bp, Capsicum chinense
  source 1..1062: mol_type = other DNA
atggaaccccaagtctcctctagaatgaagaagttgttgttggttatcaactgcatcattttggctgttggtacttgtggtggtccattgattatgaggttgtactttatcaaaggtggcaagagaatctggttgtcatcttggttgcaaactgctgcttggccaatcaatttcattccattggttatctcgtacatctacaggcgtaaatcgaacaacaacaataccaccaagttgatcttgatgaccccacaaattttggttgttaccattggtatcggtatcttgcaaggttacgctaattacttttacgcttacggtattgccaagttgccagtttctacttctggtttgttgtttgctactcaattggctttcactgctttcttcgctttcttgatcgttaagttgaagttcacctcctactccgttaactctgttttcttgttgactattggtgctgttgttttggccttgagatcttctggtgatcaacctgaaggtgaacctaagaaagagtacattttgggtttcattatgaccttggctgctgctgctttgtctggtttgatttttccattagtcgagctgatctacaagaaggctcaacaagctattacttacaccttggttttggagttccaaaccgtttactgtttcattgctactgttttggctaccatcggtatgatcattaacaaggatttccaagccatttccagagaagctaactcttttgaattgggcgaatccaagtactacatcgttatagtttggtccgctatcgtcttgcagttttactttttgggtgttatcggcgttatctactctgcttcttctttggtttccggcattttgatctctgttttgttgccagctactgaagttttggccgttttcttatacggtgaaaagttcaatgccgagaagggtatttctttggctttgtctttatggggtttcgcctcttacttttatggtgactacaaagagaacaagaagagggaaaacaaccagtctcaagaaactgaaatgaccgataagtctaactgtaccccatga

SEQ ID NO: 617 - protein, 345 aa, Jatropha curcas
MRRALLVLNCVILSIGNCGGPLIMRLYFIHGGKRVWLSSWLETAGWPIIFIPLLISYFHRRSTTDPTTAKLFYMKPSLFLAATGIGILTGFDDYLYAYGVARLPVSTSSLIIATQLAFTAGFAFLLVKQKFTSYSINAVVLLTVGAGVLALHTSSDRPEHESKKEYNLGFVMTLGAAVLYGLILPLVELTYRKAKQEISYTLVMEIQMIMCLFATVVCTVGMLVNNDFKVIPREAKEFELGETKYYVIMVWSAIIWQCFFLGAIGIVFCASSLASGVVIAVLLPVTEILAVIFYQEKFQAEKGVALALSLWGFLSYFYGEIKQSKKTNLTSEIETSESSIPTQNV

SEQ ID NO: 618 - DNA, 1038 bp, Jatropha curcas
  source 1..1038: mol_type = other DNA
atgagaagggccttgttggttttgaactgcgttattttgtctatcggtaattgtggtggtccattgattatgaggttgtactttattcacggtggtaagagagtttggttgtcatcttggttggaaactgctggttggccaattatctttatccctttgttgatctcctacttccacagaagatctactactgatccaactactgctaagctgttttacatgaagccatctttgtttttggctgctaccggtattggtattttgactggttttgatgattacttgtacgcttacggtgttgctagattgccagtttctacttcctctttgattatcgctactcaattggcttttaccgctggttttgcttttttgttggtcaagcaaaagttcacctcctactctattaacgccgttgttttgttgactgttggtgctggtgttttggcattgcatacttcatctgatagaccagaacacgagtctaagaaagagtacaatttgggtttcgttatgactttgggtgctgctgtcttgtatggtttgattttgccattggttgagctgacttacagaaaggctaaacaagaaatctcctacaccttggtcatggaaatccaaatgattatgtgtttgttcgctaccgttgtctgtactgttggtatgttggttaacaacgatttcaaggtcattccaagggaagccaaagaatttgaattgggtgaaactaagtactacgtcatcatggtttggtccgctattatttggcaatgttttttcttgggtgccatcggtatagttttctgtgcttcttctttggcatccggtgttgttattgctgttttgttaccagttaccgaaatcttggccgttatcttctaccaagaaaagttccaagctgaaaagggtgttgctttggctttgtctttgtggggttttttgtcttacttctacggtgaaatcaagcagtccaaaaagactaacttgacctccgaaattgaaacctccgaatcttctattccaactcagaacgtttaa

SEQ ID NO: 619 - protein, 348 aa, Papaver trinifolium
MGKYLLLFNCILLAVSSAAGPLLLRLYFIHGGKRLWLLSWLETAGWPILFLPLSLSYFLKRRRFKNGQDEKPSKFFMITPFLFMASAFIGLLIGLDDYLYTYGVSLLPVSTSALIMSTHLAFTAGFALFMVKQKFTSYSVNAVILLTVGAVLLGLHSNGDKPVHESNRDYYLGFVITIGASVIGGLLLPLVELMYKKSKQTITYSLVIELQIVISVFATLFCTVGMLVNNDFKVIQREGKEYNLGETKYYVVLVASSISWQLCFLGTIGVIFCSTSLLAGVIGAVVLPVIEILAVIFYHESFKAEKGIALFLSLWGFISYFYLELKASRKPKKKQSLELEQGDLTVSS

SEQ ID NO: 620 - DNA, 1047 bp, Papaver trinifolium
  source 1..1047: mol_type = other DNA
atgggcaaatacctgctgttgttcaactgcattttgttggctgtttcttctgctgctggtcctttgttgttgaggttgtactttattcatggtggtaagaggttgtggttgttgtcttggttggaaactgctggttggccaattttgtttttgccattgtccttgtcctactttttgaagcgtagaagattcaagaacggtcaagacgaaaagccatctaagttcttcatgattacccctttcttgttcatggcttctgctttcattggtttgttgatcggtttggatgattacttgtacacctacggtgtttctttgttgccagtttctacatccgctttgattatgtctactcatttggcttttaccgctggttttgctttgtttatggtcaagcaaaagttcacctcctactctgttaacgccgttattttgttaactgttggtgctgtcttgttgggcttgcattctaatggtgataagccagttcatgaatccaacagagattactacttgggtttcgtgattactattggtgcctctgttattggtggtttgttattgcctttggtcgagttgatgtacaagaagtctaagcaaaccatcacctactcattggtcatcgaattgcaaatcgtcatttctgttttcgctaccttgttctgtactgttggtatgttggttaacaacgacttcaaggtcattcagagagaaggtaaagagtacaatttgggcgaaactaagtactacgttgttttggttgcctcctctatttcttggcaattgtgtttcttgggtactatcggtgttattttctgctctacctctttgttagctggtgttattggagctgttgttttgccagttattgaaatcttggccgttatcttctaccacgaatcttttaaagccgaaaagggtattgccctgtttttgtctttgtggggtttcatctcttacttctacttggaattgaaggcctctagaaagccaaagaagaagcaatctttggaattggaacaaggtgacttgactgtctcttcttga

SEQ ID NO: 621 - protein, 562 aa, Aquilegia coerulea
MPVSSDYKHDEEAPTTHVGSKQGGWITFPFITGLTIAASGWMTNLIVYLIEQFNVKNIRATQISNIVNGSTNFFPIAGAIIADSYLGNFFVISVSSIISLLGLILFTLSATLDSLRPKACKQGLETCEAPSHFQLAILYSAITLASIGMGGTRFTIATLGANQFDKPKDQGAFFNWFFVALYMASITGITVIVYIEDNVSWGLGFGLCLVLNAIGLAVFVFGKQYYRHIKPDGSPFTSLARVIVATIRKMNIMVSSDNKDYYYGHTGETKLPVDQGPTSSFRFLNRAAMKTEGDTEQERELTESWNLCTVQQVEDLKTLLRIFPLWSTSIFLSTPIGIQSSLMVLQALSMDRHLGPHVKIPAGSFLVATLLATAFSLSVIDQFFFPAWKKLTRQSMTPLQRIGVGHVLNIVGMAGSALVESRRLDVAKSHNLTHQLGSIVPMSAFWLVTPLVIVGIGEAFHFPGQVALYYKEFPTSLRSTATAMISLLVAAGFYLSTALIDLIQKVTGWLPDNINEGRIDNVFWVLVVTGVINLGYYITCAMLYRYKNVENAEEKSETANDG

SEQ ID NO: 622 - DNA, 1689 bp, Aquilegia coerulea
  source 1..1689: mol_type = other DNA
atgccagtctcctccgattacaaacatgatgaagaggctccaactactcatgttggttctaaacaaggtggttggattactttcccattcattaccggtttgactattgctgcttctggttggatgactaacttgatcgtttacttgatcgaacagttcaacgtcaagaacattagagctacccaaatctccaatatcgttaacggttctaccaacttctttccaattgctggtgctattattgccgattcttacttgggtaacttcttcgttatctccgtcagctccattatttctttgttgggtttgatcctgttcaccttgtctgctactttggattctttaagaccaaaggcttgtaagcaaggtttggaaacttgtgaagctccatctcattttcaattggccatcttgtactctgctattaccttggcttctattggtatgggtggtactagattcactattgctactttaggtgccaaccagtttgataagccaaaagatcaaggtgctttcttcaactggtttttcgttgccttgtacatggcttccattactggtattactgtcatcgtctacatcgaggataatgtctcttggggtttaggttttggtttgtgcttggttttgaacgctattggtttggctgttttcgtttttggtaagcagtactacagacacattaagccagatggttctccattcacatctttggctagagttatcgttgctaccatcagaaagatgaacatcatggtttcttccgacaacaaggattactactatggtcatactggtgagactaagttgccagttgatcaaggtccaacatcttctttcagattcttgaatagagctgccatgaagactgaaggtgatactgaacaagaaagggaattgactgaatcttggaacttgtgtaccgttcaacaagttgaggatctgaaaaccttgttgagaattttcccattgtggtcgacctccatttttttgtctactccaattggtatccagtcctctttgatggttttacaggctttgtctatggatagacatttgggtccacatgttaagattccagctggttcttttttggttgcaactttgttggctactgccttctctttgtctgttatcgatcaatttttcttccccgcctggaaaaaattgaccagacaatctatgactccattgcaaagaattggtgttggtcacgttttgaacatagttggtatggcaggttctgctttggttgaatctagaagattggatgttgccaagtctcataacttgactcatcaattgggttccatcgttccaatgtctgctttttggttagttaccccattggttattgtcggtattggtgaagcttttcatttcccaggtcaagtagccttgtactacaaagaatttccaacctctttgagatctactgctaccgctatgattagtttgttggttgctgctggtttctacttgtctactgctttgattgacttgatccaaaaggttactggttggttgccagataacattaacgaaggtagaatcgacaacgttttctgggttttagttgttaccggtgttatcaacttgggttactacattacttgcgctatgttgtacagatacaagaacgttgaaaacgccgaagaaaagtctgaaactgctaacgatggttaa

SEQ ID NO: 623 - protein, 571 aa, Aquilegia coerulea
MATKELPFSGEYMHDEEAPTKCVGQKKGGWTTFPFVTVSLLGLSIAVAGWMTNLIVYLIQKFNIKNIHATEIYNVVNGCTCFFPIVGAIIADSFVGNFFVILVSSILSLLGLVLLTLTATLDSLRPRDCKGDLETCEAPSQFQLAILFSAITLVSIGSGGTRFTLATMGADQFDKTKDQGTFFNWFFFTFYLATVIGITAIVYIEDNVSWGVGYILCLAINAIGLTIFICGKRYYRHIKPCGSPFTSLARVIVATIRKKKMVLSSESKDYYYGRIDETMFNAIIGPTSSFRFLNRAAMKTEGDAQQEGKLTESWSLCTVQHVEDFKSLIKIFPLWSTSIFLSTPIAIQMSLMVLQALTMDRHVGPHFSIPSSSFLVFTLLFTAISLSIFDRLLFPMWKKLTRRPMTPLLRLGIGHVLNIVGMAGSALVESRRLHVVRTHNLTHQPNSAAPMSALWLVAPLAIVGVGEAFHFPGQVALYYQEFPTSLKSTATAMISLVIAVAFYLSTALINLTQKITGWLPDNINEGRIDNVFWMLVILGVINFGYYITCAMLYKYNNVENAEQISETVTEA

SEQ ID NO: 624 - DNA, 1716 bp, Aquilegia coerulea
  source 1..1716: mol_type = other DNA
atggccaccaaagaattgccattttctggtgagtatatgcatgatgaagaggctccaacaaaatgcgttggtcaaaaaaaaggtggttggactactttcccattcgttactgtttctttgttgggtttgtctattgctgttgctggttggatgactaacttgatcgtttacttgatccagaagttcaacatcaagaacattcatgccaccgaaatctacaatgttgttaacggttgtacctgcttctttccaatcgttggtgctattattgccgattcttttgtcggtaacttcttcgtcattctggtgtcctctatcttgagtttgttaggtttggttttgttgactttgaccgctaccttggattctttaagaccaagagattgcaagggtgatttggaaacttgtgaagctccatctcaattccaattggctattttgttctccgccattaccttggtttctattggttctggtggtactagattcactttggctactatgggtgctgatcaattcgataagacaaaggatcaaggcactttcttcaactggttcttcttcactttttacttggccaccgttattggtattaccgccattgtctacatcgaggataatgtttcttggggtgttggttacattttgtgcttggctattaacgctattggcttgaccattttcatttgcggtaaaaggtactacagacacattaagccatgtggttctccattcacatctttggctagagttatcgttgctaccatccgtaaaaagaagatggtcttgtcctctgaatctaaggattactactacggtagaatcgacgaaactatgttcaacgcaattattggtccaacctcctcattcagatttttgaatagagctgctatgaagaccgaaggtgatgctcaacaagaaggtaaattgactgaatcctggtctttgtgtaccgttcaacacgttgaagatttcaagtcgttgatcaagattttcccattgtggtccacctccatttttttgtctacaccaattgccatccagatgtccttgatggttttacaagctttgaccatggatagacatgttggtccacatttctctatcccatcttcatctttcttggtgttcactttgttgttcaccgctatctcattgtccattttcgataggttgttgttcccaatgtggaagaaattgactagaaggccaatgactcctttgttgagattaggtattggtcacgttttgaacatcgttggtatggctggttctgctttggttgaatctagaagattgcatgttgttaggacccataacttgactcatcaacctaattctgctgctccaatgtctgctttgtggttggttgctccattggctatagttggtgttggtgaagcttttcattttccaggtcaagttgccttgtactaccaagaatttccaacctctttgaagtctactgctaccgctatgatttccttggttattgcagttgctttctacttgtctaccgccttgattaacttgacccaaaagattactggttggctgccagataatatcaacgaaggtaggattgataacgtgttctggatgttagttatcttgggtgttatcaacttcggctactacattacttgtgccatgttgtataagtacaacaacgttgaaaacgccgaacagatttctgaaactgttactgaagcttaa

SEQ ID NO: 625 - protein, 566 aa, Nelumbo nucifera
MSDTKLERPDRKLSCEPTLDNEAQTTIVGNKQGGWITFPFITVSTLGLTLASSGWLSNLTVYLIQQFNVKSIDAAQVYNVVSGCATLFPIAGAIIADSLGCFPVISVSSFISLLAVILFTITATSSSLKPPPCVNIGSAAAAESCKTPSKLQYGLLYSAIALGAIGMGGSRFTTATMGADQFNNAKDQGIFFNWYFFILYVASAAGATVIVYVEDNVGWGWGYGIAIGANTVGLLAFLIGKRYFRHAKPKGSPFTSLARVLVATIRKRKVAVSSQTQDYYYGHGDLTKLPYPPPTPSFKFLNRAALKSEEDIRVDGSAANQWRLCTVQEVEDLKALIRISPLWSTGIFVSVPIGILTSLIILEALRMDRHVGPHFKIPAGSFLVFLLISTALSLCFMDRFFYPTWLKLTRRTMTPLQRVGIGHILNITAMAASAIVESRRLHVARSHHLDDQPGSIVPMSALCLVAPLALVGAGEAFHFPGQVELYYQEFPASLRSTATAMVSLLAAVGFYLSTVVIDLTRRVTGWLPDDINHGRLDKVFWMLVVVGAINFVYYLICTKLYKYQKR

SEQ ID NO: 626 - DNA, 1701 bp, Nelumbo nucifera
  source 1..1701: mol_type = other DNA
atgtccgacaccaaattggaaagaccagacagaaaattgtcttgcgaacctactttggataacgaagctcaaactactatcgtcggtaacaaacaaggtggttggattactttcccattcattactgtttctaccttgggtttgactttggcttcttctggttggttgtctaacttgaccgtttacttgatccaacagttcaacgttaagtccattgatgctgctcaagtttacaatgttgtttctggttgtgctacgttgtttccaattgctggtgctattattgctgattctttgggttgtttcccagtgatctctgtctcttcattcatttctttgttggccgttatcctgtttactattactgctacctcctcctctttgaaaccaccaccatgtgttaatattggttcagctgctgctgcagaatcttgtaaaactccatctaaattgcagtacggcttgttgtattctgctattgctttgggtgctattggtatgggtggttctagattcactactgctactatgggtgctgatcaattcaacaatgctaaggatcaaggcatcttcttcaactggtacttctttatcttgtacgttgcttctgctgctggtgcaactgttatagtttacgttgaagataatgttggttggggttggggatatggtattgcaattggtgctaatactgttggcttgttggctttcttgattggtaagagatacttcagacatgctaagccaaaaggttctccattcacatctttggctagagttttggttgctaccatcagaaaaagaaaggttgccgtttcttcacaaacccaggattattactatggtcatggtgatttgaccaagttgccatatccaccaccaacaccatcttttaagtttttgaatagagccgccttgaagtccgaagaggatattagagttgatggttctgctgcaaatcaatggcgtttgtgtactgttcaagaagttgaagatttgaaggccttgatcagaatttctccattgtggtctactggcatctttgtttctgttccaattggtatcttgacctccttgattattttggaagccttgagaatggatagacatgttggtccacatttcaaaattccagctggttctttcctggtgttcttgttgatttctactgctttgtctttgtgcttcatggacagatttttctacccaacttggctgaagttgactagaagaactatgactccattgcaaagagttggtatcggtcatattttgaacattacagctatggctgcttccgctattgtcgaaagtagaagattgcatgttgccagatctcatcacttggatgatcaaccaggttctatagttccaatgtcagctttgtgtttagttgctccattggctttggttggtgctggtgaagcttttcattttccaggtcaagttgagttgtactaccaagaatttccagcctctttgagatctacagctactgctatggtttctttattggctgctgttggattctacttgtccaccgttgttattgacttgaccagaagagttacaggttggttaccagatgatatcaaccatggtagattggacaaggttttctggatgttagttgttgttggtgccatcaacttcgtctactatttgatctgtaccaagctgtacaagtaccagaaaaggtga

SEQ ID NO: 627 - protein, 577 aa, Prunus yedoensis var. nudiflora
MDESLSHNDEAHASSSHSGSRRGGWITFPFITYPSYDYELLYCAGALVGLTLTAGGWLSNLIVFLIEEFNVKSIDAAQIANVVNGSSSFFPIIGAIVADSLFGSFSVISISSCISLLGIIVLALTASLNSLRPQPCVVGSELCQPTSTLQDAVLYTGIALASIGLGGTRYTLATMGANQFDKPKNQASFFNWYFFTLYSTTAVALTVIVYIEDNAGWRWGFGLCVLTNIIGLAVFLTGTRFYNIDKPQGSPFVALARVVVAAFRKRKLQLSSESKDYYDGHDGVKEGIVTGTLSTTFRFLNRAAQKIEGDIRSDGSIAKPWRLSTMQQVEDFKTIIRILPLWSTTIFLSTPLGVQSSMIVLQALSMDRHIGPHFKMPSGSVIVIVLLSTAISLTLIDRFLCPVWQKLTGRSPTPLQRIGLGHVLNVLSMALSALVESKRLKIAKANHLQPVVPMQAFWLFPQLVLAGIGEAFHFPGQVALYYQEFPVSLRSTSTAMISLVIGIAFYLSTGVINLVQRVTGWLPNDINKGKLDNVYWMLVVVGVLNFGYYLVCAKLYKYQNVKGADVNSGSADSENDN

SEQ ID NO: 628 - DNA, 1734 bp, Prunus yedoensis var. nudiflora
  source 1..1734: mol_type = other DNA
atggacgagtccttgtctcataacgatgaagctcatgcttcttcatctcattctggttctagaagaggtggttggattactttcccattcattacttacccatcctacgattacgagttgttgtattgtgctggtgctttggttggtttgactttgactgctggtggttggttgtctaatttgatcgttttcttgatcgaagagttcaacgtcaagtctattgatgctgctcaaattgccaatgttgtcaacggttcttcttctttcttcccaattattggtgctatcgttgccgattctttgttcggttctttctccgttatttccatctcctcttgcatttctttgttgggtattatcgttttggctttgaccgcttctttgaattccttaagaccacaaccatgtgttgtcggttctgaattgtgtcaacctacttctactttacaagatgctgtcttgtacaccggtattgctttggcttctattggtttaggtggtactagatacactttggctactatgggtgctaatcaattcgacaagccaaagaatcaagcctcttttttcaactggtacttcttcaccttgtactctactactgctgttgctttgactgttatcgtctacattgaagataatgctggttggagatggggttttggtttgtgtgttttgaccaacattattggcttggccgtttttttgactggtactaggttttacaacatcgataagccacaaggttctccatttgttgctttagctagagttgtagttgctgcctttagaaagagaaagttgcagttgtcctctgagtctaaggattattacgatggtcatgacggtgtcaaagaaggtatagttactggtacattgtctaccaccttcagatttttgaatagagctgcccaaaagatcgaaggtgatattagatctgatggttccattgctaaaccttggagattgtctactatgcaacaagttgaagatttcaagaccatcatcaggattttgccattgtggtctactaccattttcttgtctactccattgggtgtccaatcctctatgatagttttacaagccttgtccatggatagacatattggtccacatttcaaaatgccatccggttctgttattgtcatcgttttgttgtctaccgctatctccttgaccttgattgatagatttttgtgcccagtctggcaaaaattgacaggtagatctccaactccattgcagagaattggtttgggtcatgttttgaacgttttgtctatggctttgtctgccttggttgaatctaagagattgaagattgctaaggccaatcacttgcaaccagttgttccaatgcaagctttttggttgtttccacaattggttttggctggtattggtgaagcttttcattttccaggtcaagttgccttgtactaccaagaatttccagtctctttgagatccacttccactgctatgatttctttggttattggtatcgccttctacttgtctacaggtgttatcaatttggtccaaagagttacaggttggttgccaaacgatatcaacaagggtaaattggataacgtctactggatgttggttgttgttggtgttttgaatttcggctactatttggtttgcgccaagttgtacaaataccaaaatgttaagggtgccgatgtcaattcaggttctgctgattctgaaaacgacaactga

SEQ ID NO: 629 - protein, 464 aa, Helicoverpa armigera
MLKRFNSQKMYGTAADDASEDADPRFRRPAPTMPGAKYEQLPLKSDADEDVFTTKPKPKWSEVCVQKSLLSLGLILLYFSLSIGLTFYQRWLLTDFKFPLTVVMYHLIVKWILSVLVRLVLHVITGTPQLVLPCMTCLRSVGPTGLASGIDVGFSNWGLELVTISLYTMTKSTTIIFILGFAILLGLEKKSWSLVGIVLMIAAGLIMFTYKATQFNLLGFNFLLIASFAAGLRWTFAQLLMQKSKLGLHNPVDMVFHVQPWMFVSLLPFTIMFEGFACYEHLQKLTADKLLPTILKVSVGATLAFAMEISEFLVVTYTSSLTLSISGIFKEMCILVLAVEVSGDVLSPINVVGLAVCLLGIIGHIIHKVLFIKSVAGTVHAIDQDFDAIKDFETVRRTSKSKGEHDTPLLEEQTWPASEESDFDSNVVLFEVLQRRDVPANPKRSRWASRNERTAKKKNHDRMY

SEQ ID NO: 630 - DNA, 1395 bp, Helicoverpa armigera
  source 1..1395: mol_type = other DNA
atgctgaagaggttcaactcccaaaagatgtatggtactgctgctgatgatgcttctgaagatgctgatccaagatttcgtagaccagctccaactatgccaggtgctaaatatgaacaattgccattgaagtccgatgccgatgaagatgtttttactactaagccaaagccaaagtggtctgaagtttgtgttcaaaagtccttgttgtccttgggtttgatcttgttgtacttctccttgtctattggcttgaccttttaccaaagatggttgttgactgacttcaagttcccattgactgttgttatgtaccacttgatcgttaagtggatcttgtccgttttggttagattggtcttgcatgttattaccggtactccacaattggttttgccatgtatgacttgcttgagatctgttggtccaactggtttggcttctggtattgatgttggtttttctaactggggtttagagttggttaccatctccttgtacactatgactaagtctaccaccattatcttcattttgggtttcgccatcttgttgggtctagaaaaaaagtcttggtccttggttggtatcgttttgatgattgctgctggcttgattatgttcacttacaaggctactcagttcaacttgttgggctttaacttcttgttgattgcttcttttgctgccggtttgagatggacttttgctcaattgctaatgcagaaatctaagttgggcttgcataacccagttgatatggtttttcatgtccaaccatggatgttcgtttctttgttgccattcaccattatgttcgaaggtttcgcttgttacgaacacttgcaaaaattgaccgctgataagttgttgcctaccatcttgaaagtttctgttggtgctactttggccttcgctatggaaatttctgaattcttggttgtgacctacacctcttctttgactttgtctatttccggcatcttcaaagagatgtgcattttggttttggccgttgaagtttctggtgatgttttgtctccaatcaatgttgttggtttggcagtttgtttgttgggtattatcggtcatatcatccacaaggtcttgttcattaagtctgttgctggtactgttcatgccatcgatcaagattttgatgccatcaaggatttcgaaaccgttagaagaacttccaagtctaagggtgaacatgatacacctttgttggaagaacaaacttggccagcttcagaagaatctgatttcgattctaacgtcgtcttgttcgaagtcttgcagagaagagatgttccagctaatccaaaaagatctagatgggcttctagaaacgaaagaaccgctaagaaaaagaaccacgacagaatgtactaa

SEQ ID NO: 631 - protein, 406 aa, Pectinophora gossypiella
MPGAKYEQLSVKPDTEEDVFTSKPKGKWSEICVQNSLLSLGLILLYFSLSIGLTFYQRWLLKEFHYPLTVVMYHLIVKWLLSVIIRIVLCLVTGVPQLLLSFPVCLKSVGPTGLASGIDVGFSNWGLELVTISLYTMTKSTTIIFILGFAILLGLEKKSWSLVGIVLMIATGLVMFTYKATQFNLLGFNFLLIASFAAGLRWTFAQLLMQKSRLGLHNPVDMVFHVQPWMFLSLLPFTIIFEGFECFEHLRESPPEEFLPTVLKVSVGATIAFAMEISEFLVVTYTSSLTLSIAGIFKEMCILVLAVEVSGDQLSPVNVVGLPLCLLGIMGHIVHKVLLIRSVAGSVTAIDSEDFDSLGRTRVHHHKSKKEEHHEPLLEDQKWQSEESDVDTNVVLYEVLQRRDGR

SEQ ID NO: 632 - DNA, 1221 bp, Pectinophora gossypiella
  source 1..1221: mol_type = other DNA
atgccaggtgctaagtacgaacaattgtctgttaagccagataccgaagaagatgttttcacctctaagccaaaaggtaaatggtccgaaatttgcgtccaaaactctttgttgtccttgggtttgatcctgttgtacttctctttgtctattggcttgaccttctaccaaaggtggttgttgaaagaatttcactacccattgaccgttgtcatgtaccatttgattgtcaagtggctgttgtccgttatcatcagaatagttttgtgtttggttaccggtgttccacagttgttgttgtcttttccagtttgcttgaaatctgttggtccaactggtttggcttctggtattgatgttggtttttctaactggggtttagagttggttaccatctccttgtacactatgactaagtctaccaccatcatcttcattttgggtttcgccattttgttgggtctagaaaaaaagtcctggtccttggttggtatcgttttgatgattgctacaggtttggttatgttcacttacaaggctacccaattcaacttgttgggtttcaacttcttgttgattgcttcttttgctgctggtttgagatggacttttgcccaattattgatgcagaagtctagattgggtctgcataatccagttgatatggttttccatgttcagccatggatgttcttgtctttgttgccattcaccattatcttcgaaggtttcgaatgcttcgaacacttgagagaatctccaccagaagaatttttgccaaccgttttgaaagtttctgttggtgctactattgctttcgccatggaaatttctgaattcttggttgttacctacacctcctcattgactttatctattgccggtatcttcaaagagatgtgcattttggttttggccgttgaagtttctggtgatcaattgtctccagttaacgttgttggtttgccattgtgcttgttaggtattatgggtcatatcgttcacaaggtcctgttgattagatctgttgctggttctgttaccgccattgattctgaagattttgactctttgggtagaaccagagttcatcatcacaagtccaagaaagaagaacatcacgaacctttgttggaagatcaaaagtggcaatccgaagaatctgatgttgataccaatgtcgtcttgtacgaagtcttgcaaagaagagatggtcgttga

SEQ ID NO: 633 - protein, 497 aa, Helicoverpa armigera
MARDGDLPTIFNPKRVRAPSVIITSEEVVESERGGGDGDRDRPNGPPTPLSPRAPLTPQASVCSAPPLTTQPSLQQAYSESAASSQDEERQLRDKKCPRSCCSKFAKKIYYGICVMLTLTASWVTSTHCIKHMYLEEYPPTTHGMVYTTESSPMVNNFTKPHNNHLYNAPFFTAWFCTNWLIFFYPLYLIVMLIHNKCKSANDIVFDAFSDFKEKGFTFARFISRCGLFCLLWTVTIYMYTYALKILLSTDVMALFATNVSCIYLLSWVILHEQFVGVRIVAAILCDTGIALLAYMDGITGSSTLGGVVLAACAAAGFAIFRVLFRKVMGDVNSGQRALFFSILGIVNASLLWPLCLALYLTGSEMLPSHRMPWIYLLVASIALLIFHLVFQFGNIITYNIFVSLALITAVPVSAALDVVLYGVQFEGMNLAGLILIGVGFFLVMFPDNWPDYIMRLLRWSRSRKRGTNGTGRNRDAMDYRTGYIRSHLRSPSGRVR

SEQ ID NO: 634 - DNA, 1494 bp, Helicoverpa armigera
  source 1..1494: mol_type = other DNA
atggccagagatggtgatttgccaactattttcaatccaaagagagttagagccccttccgttattatcacttctgaagaagttgtcgaatctgaacgtggtggtggtgatggtgacagagatagaccaaatggtccaccaactccattgtctccaagagcacctttgactccacaagcttcagtttgttctgctccaccattgactactcaaccatctttacaacaagcctactctgaatctgctgcttcttcacaagatgaagaaagacaattgagagacaagaagtgtcctagatcttgttgttctaagttcgccaagaaaatctactacggtatctgtgttatgttgaccttgactgcttcttgggttacttctactcattgcattaagcacatgtacttggaagaatacccaccaactactcatggtatggtttacactactgaatcctctccaatggttaacaacttcactaagccacataacaaccacttgtacaatgctccattttttactgcctggttctgtaccaactggttgatttttttctaccccttgtacctgatcgtcatgttgattcataacaagtgcaagtccgctaacgacatcgtttttgatgctttctccgacttcaaagaaaagggttttactttcgccagattcatctctagatgtggcttgttttgtttgttgtggactgttaccatctacatgtacacttacgccctgaagattttgttgtctactgatgttatggctttgttcgctaccaacgtttcttgtatctacttgttgtcatgggtcatcttgcacgaacaatttgttggtgttagaatcgttgctgccattttgtgtgatactggtattgctttgttggcctacatggatggtattactggttcttctactttaggtggtgttgttttggctgcttgtgctgctgctggttttgctatttttagagtcttgttcagaaaggtcatgggtgatgttaattctggtcaaagagctttgttcttcagcatcttgggtatcgttaatgcctctttgttatggccattgtgtttggccttgtatttgactggttctgaaatgttgccatctcatagaatgccatggatatacttgttggttgcttctattgccttgctgatcttccatttggttttccaattcggtaacatcatcacctacaacatcttcgtttctttggctttgattaccgctgttccagtttcagctgctttggatgttgtcttgtatggtgttcaattcgagggtatgaatttggccggtttgattttgattggtgtcggttttttcttggtcatgtttccagataattggcccgattacattatgaggttgttgagatggtccagatctagaaaaagaggtacaaacggtactggtagaaacagagatgctatggattatagaaccggctacatcagatctcatttgagatcaccatcaggtagagtcagatga

SEQ ID NO: 635 - protein, 380 aa, Ricinus communis
MGILVSRISFNKLNIEQITELVKMETEYIVSNNPVSGEEEKMSSTLNKFLLIVNGTMLAIGNCGGPLIQRLYFLKGGKGVWISSFLQTAGWPFIIFPLFVSYIHRRSKNAGSTKLYYITPRLFIACAVIGVLTGLDDFLAAYGVSLLPVSTSALIIATQLGFTAGFAYVLVKQKFTPFTVNAIFLLSIGAVVLVLHASSDRPPHETNGQYLSGFFMTLGASALYGFVLPLIELTYKKANQTITYTLVMEMQLVISFFATAFCTTGMLLHKDFAAIPREASEFELGKAKYYVVLMVNAIFWQLFFMGAVGVVFCGSSLLSGIIIATLLPVTETLAVFFYHEKFRVEKGISLVLSLWGFMFYFYGELQRNKKKKQTSELAVT

SEQ ID NO: 636 - DNA, 1143 bp, Ricinus communis
  source 1..1143: mol_type = other DNA
atgggcatcttggtgtccagaatctctttcaacaagttgaacatcgaacagatcaccgaattggttaagatggaaactgagtacatcgtgtctaacaatccagtttctggtgaagaggaaaagatgtcctctactttgaacaagttcctgttgatcgttaacggtactatgttggctattggtaattgtggtggtccattgattcaaaggctgtactttttgaaaggtggtaaaggtgtttggatctcctctttcttgcaaactgctggttggccattcattattttccctttgttcgtttcctacatccacagaagatctaaaaacgctggttctaccaagttgtactacattactccaaggttgttcattgcttgcgctgttattggtgttttgactggtttggatgatttcttggctgcttacggtgtttctttgttgccagtttctacttccgctttgattattgctactcaattgggttttaccgctggttttgcttacgttttggttaagcaaaagttcaccccattcactgttaacgccattttcttgttatccattggtgctgttgttttggtcttgcatgcttcttcagatagaccacctcacgaaactaatggtcaatatttgtctggtttctttatgaccttgggtgcttctgcattatacggttttgttttgccattgatcgagctgacttacaagaaggctaatcaaactattacctacaccttggtcatggaaatgcaattggttatttctttcttcgctaccgctttctgtactactggtatgttgttgcataaggatttcgctgctattccaagagaagcctctgaatttgaattgggtaaagccaagtactacgttgtcttgatggttaatgctatcttctggcagttgtttttcatgggtgcagttggtgttgttttctgtggttcttctttgctgtccggtattatcattgctaccttgttaccagttactgaaaccttggctgttttcttctaccacgaaaaattcagggttgagaagggtatctctctggttttgtctttgtggggttttatgttctacttctacggtgaattgcagaggaacaagaagaagaagcaaacttctgaattggccgttacctga

SEQ ID NO: 637 - protein, 407 aa, Heliothis virescens
MPGAKYEQLPLKSDADEDVFTTKPKPKWSEVCVQKSLLSLGLILLYFSLSIGLTFYQRWLLTDFKFPLTVVMYHLIVKWILSVLVRLVLHVITGTPQLVLPCMTCLRSVGPTGLASGIDVGFSNWGLELVTISLYTMTKSTTIIFILGFAILLGLEKKSWSLVGIVLMIAAGLIMFTYKATQFNLLGFNFLLIASFAAGLRWTFAQLLMQKSKLGLHNPVDMVFHVQPWMFVSLLPFTIMFEGFACYEHLQKLTADKLLPTILKVSVGATLAFAMEISEFLVVTYTSSLTLSISGIFKEMCILVLAVEVSGDVLSPINVVGLAVCLLGIIGHIIHKVLFIKSVAGTVHAIDQDFDAIKDFETVRRTSKSKGEHDTPLLEEQTWPASEESDFDSNVVLFEVLQRRDGR

SEQ ID NO: 638 - DNA, 1224 bp, Heliothis virescens
  source 1..1224: mol_type = other DNA
atgccaggtgctaagtacgaacaattgccattgaaatctgatgccgacgaagatgtttttactactaagccaaaacctaagtggtccgaagtttgtgttcaaaagtctttgttgtccttgggcttgatcttgttgtacttctctttgtctattggcttgaccttctaccaaagatggttgttgactgatttcaagttcccattgaccgttgttatgtaccacttgatcgttaagtggatcttgtccgttttggttagattggtcttgcatgttattaccggtactccacaattggttttgccatgtatgacttgcttgagatctgttggtccaactggtttggcttctggtattgatgttggtttttctaactggggtttagagttggttaccatctccttgtacactatgactaagtctaccaccatcatcttcattttgggtttcgccattttgttgggtctagaaaaaaagtcctggtccttggttggtatcgttttgatgattgctgctggtttgattatgttcacttacaaggctacccagttcaacttgttgggttttaacttcttgttgattgcttctttcgctgcaggtttgagatggacttttgctcaattgctgatgcagaaatctaagttgggtctgcataatccagttgacatggtttttcatgttcagccatggatgttcgtttctttgttgccattcaccattatgttcgaaggtttcgcttgttacgaacacttgcaaaaattgaccgctgataagttgttgcctaccatcttgaaagtttctgttggtgctactttggctttcgctatggaaatttctgaattcttggttgtgacctacacctcttctttgaccttgtctatttccggtatcttcaaagagatgtgcattttggttttggccgttgaagtttctggtgatgttttgtctccaatcaatgttgttggtttggcagtttgtttgttgggcattattggtcatatcatccacaaggtcttgttcattaagtctgttgctggtactgttcatgccatcgatcaagattttgatgccatcaaggatttcgaaaccgttagaagaacttccaagtctaagggtgaacatgatacacctttgttggaagaacaaacttggccagcttctgaagaatctgatttcgattctaacgtcgtcttgttcgaagtcttgcagagaagagatggtagatga

SEQ ID NO: 639 - protein, 349 aa, Vitis vinifera
MEAQLSSNMRKALLVLNCVILSIGNCGGPMVMRLYFVRGGERIWFSSWLETAGWPLILVPLIITYIHRRTKQGSHAKLFFMKPPLFVASAVIGVLTGFDDYLYAYGVAKLPVSTSALIIASQLAFTAAFAFLLVKQKFTSYSVNAIFLLSIGAGVLALHTSSDRPANESNKEYYLGFVMTLAAAALYGFILPLVELTYKKAKQAITYSLVMEIQMVMCFFATVFCTVGMLVNNDFQAISREAKEYELGEAKYYLVVVWNGIIWQCFFLGAIGVIFSASSLVCGIVIAVLLPVTEILAVIFFQEKFQAEKGVSLALSLWGFVSYFYGEIKDSKKKKNPTPETELPQTVNP

SEQ ID NO: 640 - DNA, 1050 bp, Vitis vinifera
  source 1..1050: mol_type = other DNA
atggaagcccagttgtcctctaatatgagaaaagctttgttggtcttgaactgcgtcattttgtctattggtaattgtggtggtccaatggttatgaggttgtactttgttagaggtggtgaaagaatctggttctcttcttggttggaaactgctggttggccattgattttggttccattgattatcacctacatccacagaagaactaagcaaggttctcatgctaagctgttttttatgaagcctcctttgtttgttgcctccgctgttattggtgttttgactggttttgatgattacttgtacgcttacggtgttgctaaattgccagtttctacttccgctttgattatcgcttctcaattggcttttactgctgcttttgctttcttgttggtcaagcaaaagttcacctcttactctgttaacgccatcttcttgttatctattggtgctggtgttttagccttgcatacttcttcagatagaccagctaacgagtcaaacaaagagtactacttgggtttcgttatgactttggctgctgctgcattatacggtttcattttgccattggttgagctgacttacaagaaggctaaacaagctattacctactccttggtcatggaaattcaaatggtcatgtgtttcttcgctaccgttttctgtactgttggtatgttggttaacaacgatttccaagccatttccagagaagccaaagaatatgaattgggtgaagccaagtactatttggttgttgtttggaacggtatcatctggcaatgttttttcttgggtgctatcggtgttattttctccgcttcttctttggtttgcggtatcgttattgcagttttgttgccagttaccgaaatcttggctgtgatattcttccaagaaaagttccaagctgaaaagggtgtttcattggctttgtctttgtggggttttgtctcttacttttacggtgaaatcaaggactccaagaagaaaaagaatccaactccagaaaccgaattgccacaaactgttaacccatga

SEQ ID NO: 641 - protein, 350 aa, Mucuna pruriens
MAQGDQDRAMKRILLIINCVLLCIGTSGGPLVMRLYFLHGGHRVWLSSFLETAGFPVMLLPLVVSYVRRRRLAAAGPDKPKLISMKPPLLLASAFIGILTGTDDYLYAYGVARLPVSTSALIIATQLAFTAFFAFLLVRQKFTAYSVNAVVMLTLGAAVLALHASGDRPAGESIKDYVTGFLVTVIAAALYGFVLPLVEWVYKKTKQPITYSLVMEIQFVMCSFATLFCVLGMTINDDFKEIPREAKNFKHGEVNYYAVLVANAIVWQAFFLGAIGVIFCSSSLLSGILIAVLLPITEGLAVIFYKEKFQVEKGFSLLLSLWGFVSYFYGEIKHARKMKKKSDTEMVMPQ

SEQ ID NO: 642 - DNA, 1053 bp, Mucuna pruriens
  source 1..1053: mol_type = other DNA
atggcccaaggtgatcaagatagagccatgaagagaatcttgttgatcatcaactgtgtcttgttgtgcattggtacatctggtggtccattggttatgaggttgtactttttacatggtggtcacagagtttggctgtcctcttttttggaaactgctggttttccagttatgttgttgccattggttgttagctacgtcagaagaagaagattggctgctgctggtccagataagccaaaattgatttctatgaagcctcctttgttgttggcttctgctttcattggtattttgaccggtactgatgattacttgtatgcttatggtgttgctagattgccagtttctacatccgctttgattattgctactcaattggctttcactgctttcttcgctttcttgttggttagacaaaagttcaccgcttactctgttaacgctgttgttatgttgactttgggtgctgctgttttggctttacatgcttctggtgatagacctgctggtgaatctattaaggattacgttactggtttcctggttaccgttattgctgctgcattatacggttttgttttgccattagtcgaatgggtctacaaaaagaccaagcaacctattacctactccttggttatggaaatccaattcgttatgtgttccttcgctaccttgttttgtgttttgggtatgaccatcaacgacgacttcaaagaaattccaagagaagccaagaatttcaagcacggtgaagttaattactacgccgttttggttgctaatgctatagtttggcaagcttttttcttgggtgctatcggtgttatcttctgctcatcttctttgttgtccggtatcttgattgcagttttgttgccaattactgaaggtttggccgtcatcttctacaaagaaaagttccaagttgagaagggcttcagcttgttgttgtctttgtggggtttcgtttcttacttctacggtgaaatcaaacacgccagaaagatgaagaaaaagtccgatactgaaatggtcatgccacagtaa

SEQ ID NO: 643 - protein, 350 aa, Macleaya cordata; identical to SEQ ID NO: 577

SEQ ID NO: 644 - DNA, 1053 bp, Macleaya cordata; identical to SEQ ID NO: 578
  source 1..1053: mol_type = other DNA

SEQ ID NO: 645 - protein, 356 aa, Ricinus communis; identical to SEQ ID NO: 513

SEQ ID NO: 646 - DNA, 1071 bp, Ricinus communis; identical to SEQ ID NO: 514
  source 1..1071: mol_type = other DNA

SEQ ID NO: 647 - protein, 369 aa, Nelumbo nucifera
MEVERQEISRHNQALNTEETMNKSLNLKRSLLLLNCALLVLGNCGGPLLIRLYFLHGGKRIWFSSWLETAGWPILLLPLLFSYSYRRSQDQGEERGSTRLFLIKPRLFAASAILGIITGLDDYLYAYGLSRLPVSTSALIASTQLIFTAIFAFFLVRQTFTSYSINSIVMLTIGALVMALHTGSDRPSNESNTQYYTGFFMTIGASALYGLVLPLVELTYKKSNQLITYSLVIEMQLVISIFATAFCSLGMLVNNDFKSIPKDASEYEIGEAKYYLVIVWSAILWQLFFLGLVGVIFCGSSMLGGIIIAAVIPVTEILAVIFCREKFKAEKGISLALCLWGFTSYFYGEIKGPSKKNSETPQPDTTPYV

SEQ ID NO: 648 - DNA, 1110 bp, Nelumbo nucifera
  source 1..1110: mol_type = other DNA
atggaagtcgaaaggcaagaaatctccagacataatcaagctttgaacaccgaagaaaccatgaacaagtctttgaacttgaagaggtccctgttgttgttgaattgtgctttgttggttttgggtaattgtggtggtccattattgatcaggttgtactttttacacggtggtaagagaatctggttctcttcttggttggaaactgctggttggccaattttgttgttgcctttgttgttctcctactcctacagaagatctcaagatcaaggtgaagaaagaggttctactaggctgtttttgattaagccaagattattcgctgcctccgctattttgggtattattactggtttggacgattacttgtacgcctatggtttgtctagattgccagtttctacttccgctttgattgcttctacccaattgattttcactgccatcttcgcatttttcttggtcagacaaactttcacctcctactctatcaactccatcgttatgttgactattggtgctttggttatggcattgcatactggttctgatagaccatctaacgaatctaacacccaatattacaccggtttctttatgacaattggtgcatctgcattatacggtttggttttgccattggttgaactgacttacaagaagtccaaccagttgattacctactccttggttatcgaaatgcagttggttatttccattttcgctaccgctttttgctctttgggtatgttggttaacaacgacttcaagtctattccaaaggatgcctccgaatacgaaattggtgaagctaagtactacttggtcatagtttggtctgctattttgtggcagttgttcttcttgggtttagttggtgttattttctgcggctcatctatgttaggtggtattatcattgctgccgttattccagttaccgaaattttggctgtcatcttctgcagagaaaagttcaaggctgaaaagggtatttctttggctttgtgtttgtggggtttcacgtcttacttttacggtgaaatcaaaggcccatcgaagaagaattctgaaactccacaaccagataccactccatacgtttaa

SEQ ID NO: 649 - protein, 558 aa, Helicoverpa armigera
MADKLHEYQGVTGRLHGARDRYKERWSRWKEEHPRGVRDVVAETLFGIPNSDEPPERVWQDSAYSDIYRRKSRIELMRISAAVMGIEFSYAGETAFVSPTLLQIGVPHQQMTLVWALSPLIGFFMTPLLGSLSDRCRSRFGRRRPFIVLMSVGVLLGLILVPNGEDIGYALGDELPMNRTEAPSALGPRSSALDTEHSNYHPWGVLFTVLGTVFLDFDADACQSPARAYLLDVTVPEDHAKGLSTFTVMAGLGGFMGYALGGINWDDTRLGKYDLEEFRRQAESQRLQESFDEGPEGPEKNLKKENVTYGALNQPESGVSINVVETGHGGGNLSLSHYLKSIVVMPSSLRVVCLTNLFCWMAHVCYSLYFTDFVGEAVFGGDPAAPVGSVSRTEYEAGVRFGCWGMAMYSLSCACYSTIIERLIKRLGAKRVYVGGLCTYSCGMVALCAIRAKAAVLLCSWTAGVMYSTLFTMPYLLVAHYHATGMWDSGGGGCGEARGIGTDVAVVSSCVFVAQLLVSFIMGFAVKAMGSTAAVVAVAATLAAAAAITATKITYLDL

SEQ ID NO: 650 - DNA, 1677 bp, Helicoverpa armigera
  source 1..1677: mol_type = other DNA
atggccgataagttgcacgaataccaaggtgttactggtagattgcatggtgctagagatagatacaaagaaagatggtccaggtggaaagaagaacatccaagaggcgttagagatgttgttgctgaaactttgtttggcatcccaaattctgatgaaccaccagaaagagtttggcaagattctgcttattccgacatctacagaagaaagtccagaatcgaattgatgagaatttccgctgctgttatgggtatcgaattttcttatgctggtgaaaccgctttcgtttctccaactttgttgcaaattggtgttccacatcaacaaatgactttggtttgggctttgtctccattgattggttttttcatgactcccttgttgggttccttgtctgatagatgtagatctagatttggtagaagaaggccattcatcgttttgatgtctgttggtgttttgctgggtttgattttggttccaaacggtgaagatattggttacgctttgggtgatgaattgccaatgaatagaactgaagctccatctgctttgggtccaagatcttctgctttagatactgaacactctaactatcatccatggggtgttttgtttaccgttttgggtactgttttcttggatttcgatgctgatgcttgtcaatctccagctagagcttatttgttggatgttactgttcctgaagatcatgctaagggtttgtctacttttactgttatggctggtttaggtggttttatgggttatgcattaggtggtattaactgggatgataccagattgggtaaatacgacttggaagaatttcgtagacaagccgaatctcagagattgcaagaatcttttgatgaaggtccagaaggtcctgaaaagaacttgaagaaagaaaacgttacctacggtgccttgaatcaaccagaatctggtgtttctatcaacgttgttgaaactggtcatggtggtggtaatttgtctttgtctcattacttgaagtccatcgtcgttatgccatcttctttgagagttgtttgtctgaccaatttgttctgttggatggctcatgtttgctacagcttgtactttactgatttcgttggtgaagctgtttttggtggtgatccagctgctccagttggttctgtttcaagaactgaatatgaagccggtgttagattcggttgttggggtatggctatgtattctttgtcttgtgcttgctactccaccatcattgaaagattgattaagagattgggtgccaagagggtttatgttggtggtttgtgtacttactcttgtggtatggttgctttgtgtgctattagagctaaagctgctgttttgttgtgttcttggactgctggtgttatgtactctactttgtttacgatgccatacttgttggttgctcattatcatgctactggtatgtgggattctggtggcggtggttgtggtgaagcaagaggtattggtactgatgttgctgttgtttcttcttgcgtttttgttgctcagttgctggtttctttcattatgggttttgctgttaaggctatgggttctactgctgcagttgttgcagttgctgctactttggctgctgctgcagctattactgctactaagattacttacctggacctgtga

SEQ ID NO: 651 - protein, 410 aa, Helicoverpa armigera
MDTSEPKDKWHLIFLTFLLHGLGTLTAWNMFITAKDYFVKYKLVNAPTYSEHYLAYVGWASQIPNLVFSWLNIFVKPKGNLTNRIVMSLIVEVVIFVFNVILAMMDSSGWPAAFFWLTMLSVFFLNGFNAIFQNSVYGVAALLPAKYTGAVVMGSNLCGLLIVFLNWCSVMFDNPRTAAIYYFIGGMFVMLICIDSYFALPLNKFYRYHEALQEQHKSAEADKPHGMRVSRAKIFAQASLQLYNVFITFVVTLAVFPSVISDIEPNTEGFLGENFVRITCFLTFNVTALLGNVTASLKQIPGPKWLVIFTTIRLVFIPFFLLCKYKSATRTLPILISNDYVFWIASALMGWTSGHGSSLAMMYIGGTVPPEQQGTAGMMGGAMLVTGIITGITFTRLCPIIVTADIWRSL

SEQ ID NO: 652 - DNA, 1233 bp, Helicoverpa armigera
  source 1..1233: mol_type = other DNA
atggacacctctgaacctaaggataagtggcatttgattttcttgaccttcttgttgcatggtttgggtactttgactgcttggaatatgttcattaccgccaaggattacttcgtcaagtacaagttggttaacgctccaacttactccgaacattatttggcttatgttggttgggcttcccaaattccaaacttggttttttcctggttgaacatcttcgttaagccaaagggtaacttgaccaacagaatcgttatgtccttgatcgttgaagttgtgatcttcgttttcaacgttatcttggctatgatggattcttctggttggccagctgcttttttttggttgactatgttgtccgtgttcttcttgaatggtttcaacgccattttccagaactctgtttatggtgttgctgctttgttgccagctaagtatactggtgctgttgttatgggttctaacttgtgtggtttgctgatcgtttttttgaactggtgttccgttatgttcgataacccaagaactgctgctatctactactttattggtggtatgttcgtcatgttgatctgcatcgattcttactttgctctgccattgaacaagttctacagatatcatgaagccttgcaagaacaacataagtctgctgaagctgataagccacatggtatgagagtttctagagctaagattttcgctcaagcttcactgcaactgtacaacgttttcattactttcgttgttaccttggccgtttttccatccgttatttctgatattgaacccaacactgaaggtttcttgggtgaaaacttcgttagaattacttgcttcctgactttcaacgtcactgctttattgggtaatgttaccgcttccttgaaacaaattccaggtccaaaatggttggttatcttcaccactatcaggttggtttttatcccctttttcctgctgtgcaaatacaagtctgctactagaactttgcccatcttgatctctaacgattacgttttctggattgcttctgctttgatgggttggacttctggtcatggttcttcattagctatgatgtatatcggtggtactgttccaccagaacaacaaggtactgctggtatgatgggtggtgctatgttagttactggtattattaccggtatcaccttcactagattgtgcccaattatagttaccgccgatatttggagatccctgtaa

SEQ ID NO: 653 - protein, 453 aa, Helicoverpa armigera
MDTTGSINTDAIESIENEEEVIDDSEERELVTDSCSTKVLDAGEQPRDKYCIVYILFYLFGVTSLVPWNFLITANDYWMYKFRDVTPNNLTMVVRKTPFQAEFTSYLNVATAIPNLLFLILNSLYGHLVPLKARLQGSLIIVTICFLVTTTFVQINTDEWQNTFFIITIVSVVIMTAASAVFIGGLVGIASRFSKEYMAAVVSGQSLGGIIAAVAQIISLAFKISPLHSALIYFVIADIMVVTSLISYALLYKIDFFTYHILRGSGGIAANRHREVYMTLVIKKVWVYAFSIFAVFAISMAVYPAVTVLVESHPATAGTDWNNIFFVPVVNYLIFNCGDYAGRLVAGFLLRPTNQWIIAFASVLRVIGVPMLMLCNAQPRKHLPVVFMWDWEYIIIMIVFAFTNGYLTNIVMINATRVVELHEREKASGLIATMLSVGLCAGAAVGMLLVHLL

SEQ ID NO: 654 - DNA, 1362 bp, Helicoverpa armigera
  source 1..1362: mol_type = other DNA
atggataccaccggttccattaacaccgatgctattgaatccatcgaaaacgaagaagaagttatcgacgactccgaagaaagagaattggttactgattcttgctccaccaaagttttggatgctggtgaacaacctagagataagtactgcatcgtttacatcctgttctacttgttcggtgttacttctttggtcccatggaatttcttgattaccgctaatgattactggatgtacaagttcagagatgtcactccaaacaacttgaccatggttgttagaaagactccattccaagctgaattcacctcttacttgaatgttgctactgccattccaaacctgttgttcttgattctgaactccttgtacggtcatttggttccattgaaagctagattgcaaggctccttgattatcgttaccatctgtttcttggttaccactaccttcgttcaaatcaacactgatgaatggcaaaacaccttcttcatcatcaccatcgtttccgttgttattatgactgctgcttccgctgtttttattggtggtttggttggtattgcctccaggttctctaaagaatatatggctgctgttgtctccggtcaatctttaggtggtattattgctgcagttgcccaaattatctctttggcctttaagatctctccattgcattctgctttgatctacttcgttattgccgatattatggtcgtcacctctttgatttcttacgccttgttgtacaagatcgacttcttcacctaccatatcttgagaggttctggtggtatagctgctaatagacatagagaagtttacatgaccctggtcatcaaaaaggtttgggtttacgctttctccattttcgctgttttcgctatttctatggctgtttatccagctgttaccgttttggttgaatctcatccagctactgctggtactgattggaacaatattttcttcgttccagtcgtcaactacctgatttttaactgtggtgattacgccggtagattggttgctggttttttgttaagacctaccaaccagtggattattgcctttgcttctgttttgagagttatcggtgttcccatgttgatgttgtgtaatgctcaacctagaaagcacttgccagttgtttttatgtgggattgggagtacatcatcatcatgattgtctttgctttcaccaacggttacttgaccaatatcgttatgattaacgccaccagagttgtcgaattgcacgaaagagaaaaagcctctggtttgattgctaccatgttgtctgttggtttgtgtgctggtgcagctgttggtatgttgttggttcatttgttgtaa

SEQ ID NO: 655 - protein, 479 aa, Helicoverpa armigera
MEMSHQAGAEAESLLRQERGAVVMPGQRQGRWDGADEKAPFLRNEPVKLTPAWEGNNLPNDTLNLKGIAMDTSEPKDKWHLIFLTFLLHGLGTLTAWNMFITAKDYFVKYKLVNAPTYSEHYLAYVGWASQIPNLVFSWLNIFVKPKGNLTNRIVMSLIVEVVIFVFNVILAMMDSSGWPAAFFWLTMLSVFFLNGFNAIFQNSVYGVAALLPAKYTGAVVMGSNLCGLLIVFLNWCSVMFDNPRTAAIYYFIGGMFVMLICIDSYFALPLNKFYRYHEALQEQHKSAEADKPHGMRVSRAKIFAQASLQLYNVFITFVVTLAVFPSVISDIEPNTEGFLGENFVRITCFLTFNVTALLGNVTASLKQIPGPKWLVIFTTIRLVFIPFFLLCKYKSATRTLPILISNDYVFWIASALMGWTSGHGSSLAMMYIGGTVPPEQQGTAGMMGGAMLVTGIITGITFTRLCPIIVTADIWRSL

SEQ ID NO: 656 - DNA, 1440 bp, Helicoverpa armigera
  source 1..1440: mol_type = other DNA
atggaaatgtcccatcaagctggtgctgaagctgaatctttgttgagacaagaaaggggtgctgttgttatgccaggtcaaagacaaggtagatgggatggtgctgacgaaaaagctccatttttgagaaatgaaccagtcaagttgactccagcttgggaaggtaacaatttgccaaatgataccttgaacttgaagggtattgctatggatacttctgaacctaaggataagtggcacttgattttcttgaccttcttgttgcatggtttgggtactttgactgcttggaatatgttcattaccgccaaggattacttcgtcaagtacaagttggttaacgctccaacttactccgaacattatttggcttatgttggttgggcttcccaaattccaaacttggttttttcctggttgaacatcttcgttaagccaaagggtaacttgaccaacagaatcgttatgtccttgatcgttgaagttgtgatcttcgttttcaacgttatcttggctatgatggattcttctggttggccagctgcttttttttggttgactatgttgtccgtgttcttcttgaatggtttcaacgccattttccagaactctgtttatggtgttgctgctttgttgccagctaagtatactggtgcagttgtaatgggttctaacttgtgtggtttgctgatcgtttttttgaactggtgctctgttatgttcgataacccaagaactgctgctatctactactttattggtggtatgttcgtcatgttgatctgcatcgattcttactttgctctgccattgaacaagttctacagatatcatgaagccttgcaagaacaacataagtctgctgaagcagataagccacatggtatgagagtttctagagctaagattttcgctcaagcttccttgcaactgtacaacgttttcattactttcgttgtcaccttggctgttttcccatctgttatttctgatattgagccaaacaccgaaggtttcttgggtgaaaatttcgttagaattacctgcttcctgactttcaatgttacagctttgttgggtaatgttaccgcctctttgaaacaaattccaggtccaaaatggttggttatcttcaccactatcaggttggtttttatcccctttttcctgctgtgcaaatacaagtctgctactagaactttgcccatcttgatctctaacgattacgttttctggattgcttctgctttgatgggttggacttctggtcatggttcttcattagctatgatgtatatcggtggtactgttccaccagaacaacaaggtactgctggtatgatgggtggcgctatgttagttactggtattattaccggtatcaccttcactagattgtgcccaattatagttaccgccgatatttggagatccctgtaa

SEQ ID NO: 657 - protein, 463 aa, Helicoverpa armigera
MADNYGTFRRNAEKSWDGADEKAPFLRNEPVKLTPAWEGNNLPNDTLNLKGIAMDTSEPKDKWHLIFLTFLLHGLGTLTAWNMFITAKDYFVKYKLVNAPTYSEHYLAYVGWASQIPNLVFSWLNIFVKPKGNLTNRIVMSLIVEVVIFVFNVILAMMDSSGWPAAFFWLTMLSVFFLNGFNAIFQNSVYGVAALLPAKYTGAVVMGSNLCGLLIVFLNWCSVMFDNPRTAAIYYFIGGMFVMLICIDSYFALPLNKFYRYHEALQEQHKSAEADKPHGMRVSRAKIFAQASLQLYNVFITFVVTLAVFPSVISDIEPNTEGFLGENFVRITCFLTFNVTALLGNVTASLKQIPGPKWLVIFTTIRLVFIPFFLLCKYKSATRTLPILISNDYVFWIASALMGWTSGHGSSLAMMYIGGTVPPEQQGTAGMMGGAMLVTGIITGITFTRLCPIIVTADIWRSL

SEQ ID NO: 658 - DNA, 1392 bp, Helicoverpa armigera
  source 1..1392: mol_type = other DNA
atggccgataactacggcacttttagaagaaatgctgaaaagtcttgggatggtgctgacgaaaaagctccatttttgagaaatgaaccagtcaagttgactccagcttgggaaggtaacaatttgccaaatgataccttgaacttgaagggtattgctatggatacttctgaacctaaggataagtggcacttgattttcttgaccttcttgttgcatggtttgggtactttgactgcttggaatatgttcattaccgccaaggattacttcgtcaagtacaagttggttaacgctccaacttactccgaacattatttggcttatgttggttgggcttcccaaattccaaacttggttttttcctggttgaacatcttcgttaagccaaagggtaacttgaccaacagaatcgttatgtccttgatcgttgaagttgtgatcttcgttttcaacgttatcttggctatgatggattcttctggttggccagctgcttttttttggttgactatgttgtccgtgttcttcttgaatggtttcaacgccattttccagaactctgtttatggtgttgctgctttgttgccagctaagtatactggtgctgttgttatgggttctaacttgtgtggtttgctgatcgtttttttgaactggtgttccgttatgttcgataacccaagaactgctgctatctactactttattggtggtatgttcgtcatgttgatctgcatcgattcttactttgctctgccattgaacaagttctacagatatcatgaagccttgcaagaacaacataagtctgctgaagctgataagccacatggtatgagagtttctagagctaagattttcgctcaagcttcactgcaactgtacaacgttttcattactttcgttgtcaccttggctgttttcccatctgttatttctgatatcgaacctaacaccgaaggtttcttgggtgaaaacttcgttagaattacttgcttcctgactttcaacgtcactgctttattgggtaatgttaccgcttccttgaaacaaattccaggtccaaaatggttggttatcttcaccactatcaggttggtttttatcccctttttcctgctgtgcaaatacaagtctgctactagaactttgcccatcttgatctctaacgattacgttttctggattgcttctgctttgatgggttggacttctggtcatggttcttcattagctatgatgtatatcggtggtactgttccaccagaacaacaaggtactgctggtatgatgggtggtgctatgttagttactggtattattaccggtatcaccttcactagattgtgcccaattatagttaccgccgatatttggagatccctgtaa

SEQ ID NO: 659 - protein, 432 aa, Helicoverpa armigera
MPGAKYEQLPLKSDADEDVFTTKPKPKWSEVCVQKSLLSLGLILLYFSLSIGLTFYQRWLLTDFKFPLTVVMYHLIVKWILSVLVRLVLHVITGTPQLVLPCMTCLRSVGPTGLASGIDVGFSNWGLELVTISLYTMTKSTTIIFILGFAILLGLEKKSWSLVGIVLMIAAGLIMFTYKATQFNLLGFNFLLIASFAAGLRWTFAQLLMQKSKLGLHNPVDMVFHVQPWMFVSLLPFTIMFEGFACYEHLQKLTADKLLPTILKVSVGATLAFAMEISEFLVVTYTSSLTLSISGIFKEMCILVLAVEVSGDVLSPINVVGLAVCLLGIIGHIIHKVLFIKSVAGTVHAIDQDFDAIKDFETVRRTSKSKGEHDTPLLEEQTWPASEESDFDSNVVLFEVLQRRDVPANPKRSRWASRNERTAKKKNHDRMY

SEQ ID NO: 660 - DNA, 1299 bp, Helicoverpa armigera
  source 1..1299: mol_type = other DNA
atgccaggtgctaagtacgaacaattgccattgaaatctgatgccgacgaagatgtttttactactaagccaaaacctaagtggtccgaagtttgtgttcaaaagtctttgttgtccttgggcttgatcttgttgtacttctctttgtctattggcttgaccttctaccaaagatggttgttgactgatttcaagttcccattgaccgttgttatgtaccacttgatcgttaagtggatcttgtccgttttggttagattggtcttgcatgttattaccggtactccacaattggttttgccatgtatgacttgcttgagatctgttggtccaactggtttggcttctggtattgatgttggtttttctaactggggtttagagttggttaccatctccttgtacactatgactaagtctaccaccatcatcttcattttgggtttcgccattttgttgggtctagaaaaaaagtcctggtccttggttggtatcgttttgatgattgctgctggtttgattatgttcacttacaaggctacccagttcaacttgttgggttttaacttcttgttgattgcttctttcgctgcaggtttgagatggacttttgctcaattgctgatgcagaaatctaagttgggtctgcataatccagttgacatggtttttcatgttcagccatggatgttcgtttctttgttgccattcaccattatgttcgaaggtttcgcttgttacgaacacttgcaaaaattgaccgctgataagttgttgcctaccatcttgaaagtttctgttggtgctactttggctttcgctatggaaatttctgaattcttggttgtgacctacacctcttctttgaccttgtctatttccggtatcttcaaagagatgtgcattttggttttggccgttgaagtttctggtgatgttttgtctccaatcaatgttgttggtttggcagtttgtttgttgggcattattggtcatatcatccacaaggtcttgttcattaagtctgttgctggtactgttcatgccatcgatcaagattttgatgccatcaaggatttcgaaaccgttagaagaacttccaagtctaagggtgaacatgatacacctttgttggaagaacaaacttggccagcttctgaagaatctgatttcgattctaacgtcgtcttgttcgaagtcttgcagagaagagatgttccagctaatccaaaaagatctagatgggcttctagaaacgaaagaaccgctaagaaaaagaaccacgacagaatgtactaa

SEQ ID NO: 661 - protein, 368 aa, Aquilegia coerulea
MEIESQVNNHDHEELNRQKTVEKLFLKRMILLLNCFLLSIGNTGGPLLLRLYFIRGGKRVWLSCWLESGGWPVMLIPLLGSYIYRVRKSKEKAKLFFLTPFLFLAGAVLGVLTGVDDWLYAYGVSKLPVSTFSLITSTHLAFTAGFAFLIVKQKFTSYTINTIVLLTVAAVVLGVHSSSDRPNGISNMEYFTGFFMTLGASALYGFVLPMVELTYKKSKTKISYTLVIEMQMVMSLFATAFCTIGMLANKDFQAIPREAKTYELGEAKYYTVLVFNAIVWQFFFLGAVGVIFSASSLLSGIMIAVLLPITETLAVLFYHEKFSSEKGIALALSLWAFVSYFYGEYKHTKEFKQTIDPQTNITKESSQP

SEQ ID NO: 662 - DNA, 1107 bp, Aquilegia coerulea
  source 1..1107: mol_type = other DNA
atggaaatcgagtcccaagttaacaaccacgatcatgaagaattgaacagacaaaagaccgtcgagaagttgttcttgaagagaatgatcttgctgctgaactgcttcttgttgtctattggtaatactggtggtcctttgttgttgaggttgtactttattagaggtggtaagagagtttggttgtcttgttggttggaatctggtggttggccagttatgttgattccattattgggttcctacatctacagggtcagaaagtctaaagaaaaggccaagttgtttttcttgacgccctttttgtttttggctggtgctgttttgggtgttttgactggtgttgatgattggttgtatgcttacggtgtttctaagttgccagtttctaccttctctttgatcacttctactcatttggctttcactgctggttttgctttcttgatcgttaagcaaaagttcacctcctacaccattaacaccatcgttttgttgactgttgctgccgttgttttaggtgttcattcatcttcagataggccaaacggtatttccaacatggaatactttaccggcttctttatgacattgggtgcttcagcattatacggttttgttttgccaatggtcgaactgacttacaagaagtctaagaccaagatctcttacaccttggtcatcgaaatgcaaatggtcatgtctttgtttgctactgctttctgtaccattggtatgttggctaacaaggatttccaagccattccaagagaagctaagacatacgaattgggtgaagctaagtactacaccgttttggtttttaacgctatcgtctggcaattctttttcttgggtgctgttggtgttattttctccgcttcttctttgctgtccggtattatgattgctgtgttgttgccaattactgaaaccttggctgttttgttctaccacgaaaagttctcttcagaaaagggtattgctttggctttgtctttgtgggcttttgtctcttacttttacggtgagtacaaacacaccaaagaattcaagcaaaccattgatccacagaccaacattaccaaagaaagctctcaaccataa

SEQ ID NO: 663 - protein, 351 aa, Saccharomyces cerevisiae
MPSQVIPEKQKAIVFYETDGKLEYKDVTVPEPKPNEILVHVKYSGVCHSDLHAWHGDWPFQLKFPLIGGHEGAGVVVKLGSNVKGWKVGDFAGIKWLNGTCMSCEYCEVGNESQCPYLDGTGFTHDGTFQEYATADAVQAAHIPPNVNLAEVAPILCAGITVYKALKRANVIPGQWVTISGACGGLGSLAIQYALAMGYRVIGIDGGNAKRKLFEQLGGEIFIDFTEEKDIVGAIIKATNGGSHGVINVSVSEAAIEASTRYCRPNGTVVLVGMPAHAYCNSDVFNQVVKSISIVGSCVGNRADTREALDFFARGLIKSPIHLAGLSDVPEIFAKMEKGEIVGRYVVETSK

SEQ ID NO: 664 - DNA, 1056 bp, Saccharomyces cerevisiae
  source 1..1056: mol_type = other DNA
atgccttcgcaagtcattcctgaaaaacaaaaggctattgtcttttatgagacagatggaaaattggaatataaagacgtcacagttccggaacctaagcctaacgaaattttagtccacgttaaatattctggtgtttgtcatagtgacttgcacgcgtggcacggtgattggccatttcaattgaaatttccattaatcggtggtcacgaaggtgctggtgttgttgttaagttgggatctaacgttaagggctggaaagtcggtgattttgcaggtataaaatggttgaatgggacttgcatgtcctgtgaatattgtgaagtaggtaatgaatctcaatgtccttatttggatggtactggcttcacacatgatggtacttttcaagaatacgcaactgccgatgccgttcaagctgcccatattccaccaaacgtcaatcttgctgaagttgccccaatcttgtgtgcaggtatcactgtttataaggcgttgaaaagagccaatgtgataccaggccaatgggtcactatatccggtgcatgcggtggcttgggttctctggcaatccaatacgcccttgctatgggttacagggtcattggtatcgatggtggtaatgccaagcgaaagttatttgaacaattaggcggagaaatattcatcgatttcacggaagaaaaagacattgttggtgctataataaaggccactaatggcggttctcatggagttattaatgtgtctgtttctgaagcagctatcgaggcttctacgaggtattgtaggcccaatggtactgtcgtcctggttggtatgccagctcatgcttactgcaattccgatgttttcaatcaagttgtaaaatcaatctccatcgttggatcttgtgttggaaatagagctgatacaagggaggctttagatttcttcgccagaggtttgatcaaatctccgatccacttagctggcctatcggatgttcctgaaatttttgcaaagatggagaagggtgaaattgttggtagatatgttgttgagacttctaaatga

SEQ ID NO: 665 - protein, 360 aa, Saccharomyces cerevisiae
MSYPEKFEGIAIQSHEDWKNPKKTKYDPKPFYDHDIDIKIEACGVCGSDIHCAAGHWGNMKMPLVVGHEIVGKVVKLGPKSNSGLKVGQRVGVGAQVFSCLECDRCKNDNEPYCTKFVTTYSQPYEDGYVSQGGYANYVRVHEHFVVPIPENIPSHLAAPLLCGGLTVYSPLVRNGCGPGKKVGIVGLGGIGSMGTLISKAMGAETYVISRSSRKREDAMKMGADHYIATLEEGDWGEKYFDTFDLIVVCASSLTDIDFNIMPKAMKVGGRIVSISIPEQHEMLSLKPYGLKAVSISYSALGSIKELNQLLKLVSEKDIKIWVETLPVGEAGVHEAFERMEKGDVRYRFTLVGYDKEFSD

SEQ ID NO: 666 - DNA, 1083 bp, Saccharomyces cerevisiae
  source 1..1083: mol_type = other DNA
atgtcttatcctgagaaatttgaaggtatcgctattcaatcacacgaagattggaaaaacccaaagaagacaaagtatgacccaaaaccattttacgatcatgacattgacattaagatcgaagcatgtggtgtctgcggtagtgatattcattgtgcagctggtcattggggcaatatgaagatgccgctagtcgttggtcatgaaatcgttggtaaagttgtcaagctagggcccaagtcaaacagtgggttgaaagtcggtcaacgtgttggtgtaggtgctcaagtcttttcatgcttggaatgtgaccgttgtaagaatgataatgaaccatactgcaccaagtttgttaccacatacagtcagccttatgaagacggctatgtgtcgcagggtggctatgcaaactacgtcagagttcatgaacattttgtggtgcctatcccagagaatattccatcacatttggctgctccactattatgtggtggtttgactgtgtactctccattggttcgtaacggttgcggtccaggtaaaaaagttggtatagttggtcttggtggtatcggcagtatgggtacattgatttccaaagccatgggggcagagacgtatgttatttctcgttcttcgagaaaaagagaagatgcaatgaagatgggcgccgatcactacattgctacattagaagaaggtgattggggtgaaaagtactttgacaccttcgacctgattgtagtctgtgcttcctcccttaccgacattgacttcaacattatgccaaaggctatgaaggttggtggtagaattgtctcaatctctataccagaacaacacgaaatgttatcgctaaagccatatggcttaaaggctgtctccatttcttacagtgctttaggttccatcaaagaattgaaccaactcttgaaattagtctctgaaaaagatatcaaaatttgggtggaaacattacctgttggtgaagccggcgtccatgaagccttcgaaaggatggaaaagggtgacgttagatatagatttaccttagtcggctacgacaaagaattttcagactag

SEQ ID NO: 667 - protein, 361 aa, Saccharomyces cerevisiae
MLYPEKFQGIGISNAKDWKHPKLVSFDPKPFGDHDVDVEIEACGICGSDFHIAVGNWGPVPENQILGHEIIGRVVKVGSKCHTGVKIGDRVGVGAQALACFECERCKSDNEQYCTNDHVLTMWTPYKDGYISQGGFASHVRLHEHFAIQIPENIPSPLAAPLLCGGITVFSPLLRNGCGPGKRVGIVGIGGIGHMGILLAKAMGAEVYAFSRGHSKREDSMKLGADHYIAMLEDKGWTEQYSNALDLLVVCSSSLSKVNFDSIVKIMKIGGSIVSIAAPEVNEKLVLKPLGLMGVSISSSAIGSRKEIEQLLKLVSEKNVKIWVEKLPISEEGVSHAFTRMESGDVKYRFTLVDYDKKFHK

SEQ ID NO: 668 - DNA, 1086 bp, Saccharomyces cerevisiae
  source 1..1086: mol_type = other DNA
atgctttacccagaaaaatttcagggcatcggtatttccaacgcaaaggattggaagcatcctaaattagtgagttttgacccaaaaccctttggcgatcatgacgttgatgttgaaattgaagcctgtggtatctgcggatctgattttcatatagccgttggtaattggggtccagtcccagaaaatcaaatccttggacatgaaataattggccgcgtggtgaaggttggatccaagtgccacactggggtaaaaatcggtgaccgtgttggtgttggtgcccaagccttggcgtgttttgagtgtgaacgttgcaaaagtgacaacgagcaatactgtaccaatgaccacgttttgactatgtggactccttacaaggacggctacatttcacaaggaggctttgcctcccacgtgaggcttcatgaacactttgctattcaaataccagaaaatattccaagtccgctagccgctccattattgtgtggtggtattacagttttctctccactactaagaaatggctgtggtccaggtaagagggtaggtattgttggcatcggtggtattgggcatatggggattctgttggctaaagctatgggagccgaggtttatgcgttttcgcgaggccactccaagcgggaggattctatgaaactcggtgctgatcactatattgctatgttggaggataaaggctggacagaacaatactctaacgctttggaccttcttgtcgtttgctcatcatctttgtcgaaagttaattttgacagtatcgttaagattatgaagattggaggctccatcgtttcaattgctgctcctgaagttaatgaaaagcttgttttaaaaccgttgggcctaatgggagtatcaatctcaagcagtgctatcggatctaggaaggaaatcgaacaactattgaaattagtttccgaaaagaatgtcaaaatatgggtggaaaaacttccgatcagcgaagaaggcgtcagccatgcctttacaaggatggaaagcggagacgtcaaatacagatttactttggtcgattatgataagaaattccataaatag

SEQ ID NO: 669 - protein, 345 aa, Saccharomyces cerevisiae
MSVADLKNNIHKLDTGYGLMSLTWRAEPIPQSQAFEAMHRVVELSRERGHKAFFNVGEFYGPDFINLSYVHDFFAKYPDLRKDVVISCKGGADNATLTPRGSHDDVVQSVKNSVSAIGGYIDIFEVARIDTSLCTKGEVYPYESFEALAEMISEGVIGGISLSEVNEEQIRAIHKDWGKFLTCVEVELSLFSNDILHNGIAKTCAELGLSIICYSPLGRGLLTGQLKSNADIPEGDFRKSLKRFSDESLKKNLTLVRFLQEEIVDKRPQNNSITLAQLALGWVKHWNKVPEYSGAKFIPIPSGSSISKVNENFDEQKTKLTDQEFNAINKYLTTFHTVGDRYEMA

SEQ ID NO: 670 - DNA, 1038 bp, Saccharomyces cerevisiae
  source 1..1038: mol_type = other DNA
atgtctgtcgccgatttgaaaaacaacatccacaagttagatactggctatggtttaatgagtttgacttggagagccgagcctatccctcagtcgcaggctttcgaggccatgcacagagtggttgagttatccagagaacgtgggcacaaggcctttttcaacgttggtgaattctatggtcccgattttattaatttgtcgtatgttcacgacttctttgcgaaatacccagatttgagaaaggatgtggttatcagttgtaaaggtggtgcagacaatgctaccttaacccccagaggcagtcacgatgatgttgtacaaagcgtaaagaattcagttagtgctattggtggctacatcgacatcttcgaagtcgcaagaatcgacacttccctatgcacgaaaggagaggtctacccctacgaatcgttcgaagcgcttgctgagatgatctccgaaggcgttattggcggtatttcattaagtgaagttaatgaagagcaaattagagctattcacaaggattggggaaagtttttgacctgcgttgaagtggaactttctttgttcagtaatgacattttacacaacggaattgctaaaacatgtgctgaattggggttgtccatcatctgctactccccactgggcagaggattgttgacaggtcaattgaagtcaaacgctgatatccctgagggtgactttagaaagtcgttaaagagatttagcgacgagtctttgaaaaaaaacctgaccttggtcaggtttctacaggaagaaatagtcgacaagcgcccacaaaacaactccattactcttgcacaactggctttgggatgggttaagcactggaacaaagttccggaatacagtggcgccaaatttatcccaattccaagtggctcttctatttccaaggttaatgaaaactttgatgaacagaaaaccaaacttaccgatcaagagttcaatgccattaacaaatatttgactactttccatactgttggtgacagatacgaaatggcgtaa

SEQ ID NO: 671 - protein, 363 aa, Saccharomyces cerevisiae
MIGSASDSSSKLGRLRFLSETAAIKVSPLILGEVSYDGARSDFLKSMNKNRAFELLDTFYEAGGNFIDAANNCQNEQSEEWIGEWIQSRRLRDQIVIATKFIKSDKKYKAGESNTANYCGNHKRSLHVSVRDSLRKLQTDWIDILYVHWWDYMSSIEEFMDSLHILVQQGKVLYLGVSDTPAWVVSAANYYATSYGKTPFSIYQGKWNVLNRDFERDIIPMARHFGMALAPWDVMGGGRFQSKKAMEERRKNGEGIRSFVGASEQTDAEIKISEALAKIAEEHGTESVTAIAIAYVRSKAKNFFPSVEGGKIEDLKENIKALSIDLTPDNIKYLESIVPFDIGFPNNFIVLNSLTQKYGTNNV

SEQ ID NO: 672 - DNA, 1092 bp, Saccharomyces cerevisiae
  source 1..1092: mol_type = other DNA
atgattgggtccgcgtccgactcatctagcaagttaggacgcctccgatttctttctgaaactgccgctattaaagtatccccgttaatcctaggagaagtctcatacgatggagcacgttcggattttctcaaatcaatgaacaagaatcgagcttttgaattgcttgatactttttacgaggcaggtggaaatttcattgatgccgcaaacaactgccaaaacgagcaatcagaagaatggattggtgaatggatacagtccagaaggttacgtgatcaaattgtcattgcaaccaagtttataaaaagcgataaaaagtataaagcaggtgaaagtaacactgccaactactgtggtaatcacaagcgtagtttacatgtgagtgtgagggattctctccgcaaattgcaaactgattggattgatatactttacgttcactggtgggattatatgagttcaatcgaagaatttatggatagtttgcatattctggtccagcagggcaaggtcctctatttgggtgtatctgatacacctgcttgggttgtttctgcggcaaactactacgctacatcttatggtaaaactccctttagtatctaccaaggtaaatggaacgtgttgaacagagattttgagcgtgatattattccaatggctaggcatttcggtatggccctcgccccatgggatgtcatgggaggtggaagatttcagagtaaaaaagcaatggaggaacggaggaagaatggagagggtattcgttctttcgttggcgcctccgaacaaacagatgcagaaatcaagattagtgaagcattggccaagattgctgaggaacatggcactgagtctgttactgctattgctattgcctatgttcgctctaaggcgaaaaatttttttccgtcggttgaaggaggaaaaattgaggatctcaaagagaacattaaggctctcagtatcgatctaacgccagacaatataaaatacttagaaagtatagttccttttgacatcggatttcctaataattttatcgtgttaaattccttgactcaaaaatatggtacgaataatgtttag

SEQ ID NO: 673 - protein, 329 aa, Saccharomyces cerevisiae
MGSMNKEQAFELLDAFYEAGGNCIDTANSYQNEESEIWIGEWMKSRKLRDQIVIATKFTGDYKKYEVGGGKSANYCGNHKHSLHVSVRDSLRKLQTDWIDILYVHWWDYMSSIEEVMDSLHILVQQGKVLYLGVSDTPAWVVSAANYYATSHGKTPFSIYQGKWNVLNRDFERDIIPMARHFGMALAPWDVMGGGRFQSKKAMEERKKNGEGLRTVSGTSKQTDKEVKISEALAKVAEEHGTESVTAIAIAYVRSKAKNVFPLVGGRKIEHLKQNIEALSIKLTPEQIEYLESIIPFDVGFPTNFIGDDPAVTKKASLLTAMSAQISFD

SEQ ID NO: 674 - DNA, 990 bp, Saccharomyces cerevisiae
  source 1..990: mol_type = other DNA
atgggctctatgaataaggaacaggcttttgaacttcttgatgctttttatgaagcaggaggtaattgcattgatactgcaaacagttaccaaaatgaagagtcagagatttggataggtgaatggatgaaatcaagaaagttgcgtgaccaaattgtaattgccaccaagtttaccggagattataagaagtatgaagtaggtggcggtaaaagtgccaactattgtggtaatcacaagcatagtttacatgtgagtgtgagggattctctccgcaaattgcaaactgattggattgatatactttacgttcactggtgggattatatgagttcaatcgaagaagttatggatagtttgcatattttagttcagcagggcaaagtcctctatttgggtgtgtctgatacacctgcttgggttgtttctgcggcaaactactacgccacatctcatgggaaaactccttttagtatctatcaaggtaaatggaatgtgttgaacagggactttgagcgcgatatcattccaatggccagacattttggtatggctctagccccatgggatgttatgggaggtggaagatttcagagtaaaaaagcaatggaggaacggaagaagaatggagagggtctgcgtactgtttcgggtacttctaaacagacggataaagaggttaagatcagtgaagcattggccaaggttgctgaggaacatggcactgagtctgttactgctattgctattgcctatgttcgctctaaggcgaaaaatgttttcccattggttggtggaaggaaaattgaacacctcaaacagaacattgaggctttaagtatcaaactgacaccagaacagatagaatacttagaaagtattattccttttgatgttggttttcctactaattttatcggtgatgatccggctgttaccaagaaggcttcacttctcacggcaatgtctgcgcagatttccttcgattaa

SEQ ID NO: 675 - protein, 375 aa, Saccharomyces cerevisiae [sequence omitted]

SEQ ID NO: 676 - DNA, 1128 bp, Saccharomyces cerevisiae
  source 1..1128: mol_type = other DNA
atgttgagaacgtcaacattgttcaccaggcgtgtccaaccaagcctattttctagaaacattcttagattgcaatccacagctgcaatccctaagactcaaaaaggtgtcatcttttatgagaataaggggaagctgcattacaaagatatccctgtccccgagcctaagccaaatgaaattttaatcaacgttaaatattctggtgtatgtcacaccgatttacatgcttggcacggcgattggccattacctgttaaactaccattagtaggtggtcatgaaggtgctggtgtagttgtcaaactaggttccaatgtcaagggctggaaagtcggtgatttagcaggtatcaaatggctgaacggttcttgtatgacatgcgaattctgtgaatcaggtcatgaatcaaattgtccagatgctgatttatctggttacactcatgatggttctttccaacaatttgcgaccgctgatgctattcaagccgccaaaattcaacagggtaccgacttggccgaagtagccccaatattatgtgctggtgttactgtatataaagcactaaaagaggcagacttgaaagctggtgactgggttgccatctctggtgctgcaggtggcttgggttccttggccgttcaatatgcaactgcgatgggttacagagttctaggtattgatgcaggtgaggaaaaggaaaaacttttcaagaaattggggggtgaagtattcatcgactttactaaaacaaagaatatggtttctgacattcaagaagctaccaaaggtggccctcatggtgtcattaacgtttccgtttctgaagccgctatttctctatctacggaatatgttagaccatgtggtaccgtcgttttggttggtttgcccgctaacgcctacgttaaatcagaggtattctctcatgtggtgaagtccatcaatatcaagggttcttatgttggtaacagagctgatacgagagaagccttagacttctttagcagaggtttgatcaaatcaccaatcaaaattgttggattatctgaattaccaaaggtttatgacttgatggaaaagggcaagattttgggtagatacgtcgtcgatactagtaaataa

SEQ ID NO: 677 - protein, 382 aa, Saccharomyces cerevisiae
MSSVTGFYIPPISFFGEGALEETADYIKNKDYKKALIVTDPGIAAIGLSGRVQKMLEERDLNVAIYDKTQPNPNIANVTAGLKVLKEQNSEIVVSIGGGSAHDNAKAIALLATNGGEIGDYEGVNQSKKAALPLFAINTTAGTASEMTRFTIISNEEKKIKMAIIDNNVTPAVAVNDPSTMFGLPPALTAATGLDALTHCIEAYVSTASNPITDACALKGIDLINESLVAAYKDGKDKKARTDMCYAEYLAGMAFNNASLGYVHALAHQLGGFYHLPHGVCNAVLLPHVQEANMQCPKAKKRLGEIALHFGASQEDPEETIKALHVLNRTMNIPRNLKELGVKTEDFEILAEHAMHDACHLTNPVQFTKEQVVAIIKKAYEY

SEQ ID NO: 678 - DNA, 1149 bp, Saccharomyces cerevisiae
  source 1..1149: mol_type = other DNA
atgtcttccgttactgggttttacattccaccaatctctttctttggtgaaggtgctttagaagaaaccgctgattacatcaaaaacaaggattacaaaaaggctttgatcgttactgatcctggtattgcagctattggtctctccggtagagtccaaaagatgttggaagaacgtgacttaaacgttgctatctatgacaaaactcaaccaaacccaaatattgccaatgtcacagctggtttgaaggttttgaaggaacaaaactctgaaattgttgtttccattggtggtggttctgctcacgacaatgctaaggccattgctttattggctactaacggtggggaaatcggagactatgaaggtgtcaatcaatctaagaaggctgctttaccactatttgccatcaacactactgctggtactgcttccgaaatgaccagattcactattatctctaatgaagaaaagaaaatcaagatggctatcattgacaacaacgtcactccagctgttgctgtcaacgatccatctaccatgtttggtttgccacctgctttgactgctgctactggtctagatgctttgactcactgtatcgaagcttatgtttccaccgcctctaacccaatcaccgatgcctgtgctttgaagggtattgatttgatcaatgaaagcttagtcgctgcatacaaagacggtaaagacaagaaggccagaactgacatgtgttacgctgaatacttggcaggtatggctttcaacaatgcttctctaggttatgttcatgcccttgctcatcaacttggtggtttctaccacttgcctcatggtgtttgtaacgctgtcttgttgcctcatgttcaagaggccaacatgcaatgtccaaaggccaagaagagattaggtgaaattgctttgcatttcggtgcttctcaagaagatccagaagaaaccatcaaggctttgcacgttttaaacagaaccatgaacattccaagaaacttgaaagaattaggtgttaaaaccgaagattttgaaattttggctgaacacgccatgcatgatgcctgccatttgactaacccagttcaattcaccaaagaacaagtggttgccattatcaagaaagcctatgaatattaa

SEQ ID NO: 679 - protein, 500 aa, Saccharomyces cerevisiae
MTKLHFDTAEPVKITLPNGLTYEQPTGLFINNKFMKAQDGKTYPVEDPSTENTVCEVSSATTEDVEYAIECADRAFHDTEWATQDPRERGRLLSKLADELESQIDLVSSIEALDNGKTLALARGDVTIAINCLRDAAAYADKVNGRTINTGDGYMNFTTLEPIGVCGQIIPWNFPIMMLAWKIAPALAMGNVCILKPAAVTPLNALYFASLCKKVGIPAGVVNIVPGPGRTVGAALTNDPRIRKLAFTGSTEVGKSVAVDSSESNLKKITLELGGKSAHLVFDDANIKKTLPNLVNGIFKNAGQICSSGSRIYVQEGIYDELLAAFKAYLETEIKVGNPFDKANFQGAITNRQQFDTIMNYIDIGKKEGAKILTGGEKVGDKGYFIRPTVFYDVNEDMRIVKEEIFGPVVTVAKFKTLEEGVEMANSSEFGLGSGIETESLSTGLKVAKMLKAGTVWINTYNDFDSRVPFGGVKQSGYGREMGEEVYHAYTEVKAVRIKL

SEQ ID NO: 680 - DNA, 1503 bp, Saccharomyces cerevisiae
  source 1..1503: mol_type = other DNA
atgactaagctacactttgacactgctgaaccagtcaagatcacacttccaaatggtttgacatacgagcaaccaaccggtctattcattaacaacaagtttatgaaagctcaagacggtaagacctatcccgtcgaagatccttccactgaaaacaccgtttgtgaggtctcttctgccaccactgaagatgttgaatatgctatcgaatgtgccgaccgtgctttccacgacactgaatgggctacccaagacccaagagaaagaggccgtctactaagtaagttggctgacgaattggaaagccaaattgacttggtttcttccattgaagctttggacaatggtaaaactttggccttagcccgtggggatgttaccattgcaatcaactgtctaagagatgctgctgcctatgccgacaaagtcaacggtagaacaatcaacaccggtgacggctacatgaacttcaccaccttagagccaatcggtgtctgtggtcaaattattccatggaactttccaataatgatgttggcttggaagatcgccccagcattggccatgggtaacgtctgtatcttgaaacccgctgctgtcacacctttaaatgccctatactttgcttctttatgtaagaaggttggtattccagctggtgtcgtcaacatcgttccaggtcctggtagaactgttggtgctgctttgaccaacgacccaagaatcagaaagctggcttttaccggttctacagaagtcggtaagagtgttgctgtcgactcttctgaatctaacttgaagaaaatcactttggaactaggtggtaagtccgcccatttggtctttgacgatgctaacattaagaagactttaccaaatctagtaaacggtattttcaagaacgctggtcaaatttgttcctctggttctagaatttacgttcaagaaggtatttacgacgaactattggctgctttcaaggcttacttggaaaccgaaatcaaagttggtaatccatttgacaaggctaacttccaaggtgctatcactaaccgtcaacaattcgacacaattatgaactacatcgatatcggtaagaaagaaggcgccaagatcttaactggtggcgaaaaagttggtgacaagggttacttcatcagaccaaccgttttctacgatgttaatgaagacatgagaattgttaaggaagaaatttttggaccagttgtcactgtcgcaaagttcaagactttagaagaaggtgtcgaaatggctaacagctctgaattcggtctaggttctggtatcgaaacagaatctttgagcacaggtttgaaggtggccaagatgttgaaggccggtaccgtctggatcaacacatacaacgattttgactccagagttccattcggtggtgttaagcaatctggttacggtagagaaatgggtgaagaagtctaccatgcatacactgaagtaaaagctgtcagaattaagttgtaa

SEQ ID NO: 681 - protein, 382 aa, Saccharomyces cerevisiae
MRALAYFKKGDIHFTNDIPRPEIQTDDEVIIDVSWCGICGSDLHEYLDGPIFMPKDGECHKLSNAALPLAMGHEMSGIVSKVGPKVTKVKVGDHVVVDAASSCADLHCWPHSKFYNSKPCDACQRGSENLCTHAGFVGLGVISGGFAEQVVVSQHHIIPVPKEIPLDVAALVEPLSVTWHAVKISGFKKGSSALVLGAGPIGLCTILVLKGMGASKIVVSEIAERRIEMAKKLGVEVFNPSKHGHKSIEILRGLTKSHDGFDYSYDCSGIQVTFETSLKALTFKGTATNIAVWGPKPVPFQPMDVTLQEKVMTGSIGYVVEDFEEVVRAIHNGDIAMEDCKQLITGKQRIEDGWEKGFQELMDHKESNVKILLTPNNHGEMK

SEQ ID NO: 682 - DNA, 1149 bp, Saccharomyces cerevisiae
  source 1..1149: mol_type = other DNA
atgagagctttggcatatttcaagaagggtgatattcacttcactaatgatatccctaggccagaaatccaaaccgacgatgaggttattatcgacgtctcttggtgtgggatttgtggctcggatcttcacgagtacttggatggtccaatcttcatgcctaaagatggagagtgccataaattatccaacgctgctttacctctggcaatgggccatgagatgtcaggaattgtttccaaggttggtcctaaagtgacaaaggtgaaggttggcgaccacgtggtcgttgatgctgccagcagttgtgcggacctgcattgctggccacactccaaattttacaattccaaaccatgtgatgcttgtcagaggggcagtgaaaatctatgtacccacgccggttttgtaggactaggtgtgatcagtggtggctttgctgaacaagtcgtagtctctcaacatcacattatcccggttccaaaggaaattcctctagatgtggctgctttagttgagcctctttctgtcacctggcatgctgttaagatttctggtttcaaaaaaggcagttcagccttggttcttggtgcaggtcccattgggttgtgtaccattttggtacttaagggaatgggggctagtaaaattgtagtgtctgaaattgcagagagaagaatagaaatggccaagaaactgggcgttgaggtgttcaatccctccaagcacggtcataaatctatagagatactacgtggtttgaccaagagccatgatgggtttgattacagttatgattgttctggtattcaagttactttcgaaacctctttgaaggcattaacattcaaggggacagccaccaacattgcagtttggggtccaaaacctgtcccattccaaccaatggatgtgactctccaagagaaagttatgactggttcgatcggctatgttgtcgaagacttcgaagaagttgttcgtgccatccacaacggagacatcgccatggaagattgtaagcaactaatcactggtaagcaaaggattgaggacggttgggaaaagggattccaagagttgatggatcacaaggaatccaacgttaagattctattgacgcctaacaatcacggtgaaatgaagtaa

SEQ ID NO: 683 - protein, 417 aa, Saccharomyces cerevisiae
MRALAYFGKGNIRFTNHLKEPHIVAPDELVIDIEWCGICGTDLHEYTDGPIFFPEDGHTHEISHNPLPQAMGHEMAGTVLEVGPGVKNLKVGDKVVVEPTGTCRDRYRWPLSPNVDKEWCAACKKGYYNICSYLGLCGAGVQSGGFAERVVMNESHCYKVPDFVPLDVAALIQPLAVCWHAIRVCEFKAGSTALIIGAGPIGLGTILALNAAGCKDIVVSEPAKVRRELAEKMGARVYDPTAHAAKESIDYLRSIADGGDGFDYTFDCSGLEVTLNAAIQCLTFRGTAVNLAMWGHHKIQFSPMDITLHERKYTGSMCYTHHDFEAVIEALEEGRIDIDRARHMITGRVNIEDGLDGAIMKLINEKESTIKIILTPNNHGELNREADNEKKEISELSSRKDQERLRESINEAKLRHT

SEQ ID NO: 684 - DNA, 1254 bp, Saccharomyces cerevisiae
  source 1..1254: mol_type = other DNA
atgagagccttagcgtatttcggtaaaggtaacatcagattcaccaaccatttaaaggagccacatattgtggcgcccgatgagcttgtgattgatatcgaatggtgtggtatttgcggtacggacctgcatgagtacacagatggtcctatctttttcccagaagatggacacacacatgagattagtcataacccattgccacaggcgatgggccacgaaatggctggtaccgttttggaggtgggccctggtgtgaaaaacttgaaagtgggagacaaggtagttgtcgagcccacaggtacatgcagagaccggtatcgttggcccctgtcgccaaacgttgacaaggaatggtgcgctgcttgcaaaaagggctactataacatttgttcatatttggggctttgtggtgcgggtgtgcagagcggtggatttgcagaacgtgttgtgatgaacgaatctcactgctacaaagtaccggacttcgtgcccttagacgttgcagctttgattcaaccgttggctgtgtgctggcatgcaattagagtctgcgagttcaaagcaggctctacggctttgatcattggtgctggccccatcggactgggcacgatactggcgttgaacgctgcaggttgcaaggacatcgtcgtttcagagcctgccaaggtaagaagagaactggctgaaaaaatgggtgccagggtttacgacccaactgcgcacgctgccaaggagagcattgattatctgaggtcgattgctgatggtggagacggcttcgattacacatttgattgctccgggttggaagtcacattgaatgctgctattcagtgtctcactttcagaggcaccgcagtgaacttggccatgtggggccatcacaagatacagttttctccgatggacatcacattgcatgaaagaaagtacacagggtccatgtgctacacacaccacgattttgaggcagtaatagaagctttggaagaaggcaggattgacattgatagagcaagacatatgataacgggcagagtcaacattgaggacggccttgatggcgccatcatgaagctgataaacgagaaggagtctacaatcaagattattctgactccaaacaatcacggagagttgaacagggaagccgataatgagaagaaagaaatttccgagctgagcagtcggaaagatcaagaaagactacgagaatcaataaacgaggctaaactgcgtcacacatga

SEQ ID NO: 685 - protein, 900 aa, Saccharomyces cerevisiae
MPGNLSFKDRVVVITGAGGGLGKVYALAYASRGAKVVVNDLGGTLGGSGHNSKAADLVVDEIKKAGGIAVANYDSVNENGEKIIETAIKEFGRVDVLINNAGILRDVSFAKMTEREFASVVDVHLTGGYKLSRAAWPYMRSQKFGRIINTASPAGLFGNFGQANYSAAKMGLVGLAETLAKEGAKYNINVNSIAPLARSRMTENVLPPHILKQLGPEKIVPLVLYLTHESTKVSNSIFELAAGFFGQLRWERSSGQIFNPDPKTYTPEAILNKWKEITDYRDKPFNKTQHPYQLSDYNDLITKAKKLPPNEQGSVKIKSLCNKVVVVTGAGGGLGKSHAIWFARYGAKVVVNDIKDPFSVVEEINKLYGEGTAIPDSHDVVTEAPLIIQTAISKFQRVDILVNNAGILRDKSFLKMKDEEWFAVLKVHLFSTFSLSKAVWPIFTKQKSGFIINTTSTSGIYGNFGQANYAAAKAAILGFSKTIALEGAKRGIIVNVIAPHAETAMTKTIFSEKELSNHFDASQVSPLVVLLASEELQKYSGRRVIGQLFEVGGGWCGQTRWQRSSGYVSIKETIEPEEIKENWNHITDFSRNTINPSSTEESSMATLQAVQKAHSSKELDDGLFKYTTKDCILYNLGLGCTSKELKYTYENDPDFQVLPTFAVIPFMQATATLAMDNLVDNFNYAMLLHGEQYFKLCTPTMPSNGTLKTLAKPLQVLDKNGKAALVVGGFETYDIKTKKLIAYNEGSFFIRGAHVPPEKEVRDGKRAKFAVQNFEVPHGKVPDFEAEISTNKDQAALYRLSGDFNPLHIDPTLAKAVKFPTPILHGLCTLGISAKALFEHYGPYEELKVRFTNVVFPGDTLKVKAWKQGSVVVFQTIDTTRNVIVLDNAAVKLSQAKSKL

SEQ ID NO: 686 - DNA, 2703 bp, Saccharomyces cerevisiae
  source 1..2703: mol_type = other DNA
atgcctggaaatttatccttcaaagatagagttgttgtaatcacgggcgctggagggggcttaggtaaggtgtatgcactagcttacgcaagcagaggtgcaaaagtggtcgtcaatgatctaggtggcactttgggtggttcaggacataactccaaagctgcagacttagtggtggatgagataaaaaaagccggaggtatagctgtggcaaattacgactctgttaatgaaaatggagagaaaataattgaaacggctataaaagaattcggcagggttgatgtactaattaacaacgctggaatattaagggatgtttcatttgcaaagatgacagaacgtgagtttgcatctgtggtagatgttcatttgacaggtggctataagctatcgcgtgctgcttggccttatatgcgctctcagaaatttggtagaatcattaacaccgcttcccctgccggtctatttggaaattttggtcaagctaattattcagcagctaaaatgggcttagttggtttggcggaaaccctcgcgaaggagggtgccaaatacaacattaatgttaattcaattgcgccattggctagatcacgtatgacagaaaacgtgttaccaccacatatcttgaaacagttaggaccggaaaaaattgttcccttagtactctatttgacacacgaaagtacgaaagtgtcaaactccatttttgaactcgctgctggattctttggacagctcagatgggagaggtcttctggacaaattttcaatccagaccccaagacatatactcctgaagcaattttaaataagtggaaggaaatcacagactatagggacaagccatttaacaaaactcagcatccatatcaactctcggattataatgatttaatcaccaaagcaaaaaaattacctcccaatgaacaaggctcagtgaaaatcaagtcgctttgcaacaaagtcgtagtagttacgggtgcaggaggtggtcttgggaagtctcatgcaatctggtttgcacggtacggtgcgaaggtagttgtaaatgacatcaaggatcctttttcagttgttgaagaaataaataaactatatggtgaaggcacagccattccagattcccatgatgtggtcaccgaagctcctctcattatccaaactgcaataagtaagtttcagagagtagacatcttggtcaataacgctggtattttgcgtgacaaatcttttttaaaaatgaaagatgaggaatggtttgctgtcctgaaagtccaccttttttccacattttcattgtcaaaagcagtatggccaatatttaccaaacaaaagtctggatttattatcaatactacttctacctcaggaatttatggtaattttggacaggccaattatgccgctgcaaaagccgccattttaggattcagtaaaactattgcactggaaggtgccaagagaggaattattgttaatgttatcgctcctcatgcagaaacggctatgacaaagactatattctcggagaaggaattatcaaaccactttgatgcatctcaagtctccccacttgttgttttgttggcatctgaagaactacaaaagtattctggaagaagggttattggccaattattcgaagttggcggtggttggtgtgggcaaaccagatggcaaagaagttccggttatgtttctattaaagagactattgaaccggaagaaattaaagaaaattggaaccacatcactgatttcagtcgcaacactatcaacccgagctccacagaggagtcttctatggcaaccttgcaagccgtgcaaaaagcgcactcttcaaaggagttggatgatggattattcaagtacactaccaaggattgtatcttgtacaatttaggacttggatgcacaagcaaagagcttaagtacacctacgagaatgatccagacttccaagttttgcccacgttcgccgtcattccatttatgcaagctactgccacactagctatggacaatttagtcgataacttcaattatgcaatgttactgcatggagaacaatattttaagctctgcacgccgacaatgccaagtaatggaactctaaagacacttgctaaacctttacaagtacttgacaagaatggtaaagccgctttagttgttggtggcttcgaaacttatgacattaaaactaagaaactcatagcttataacgaaggatcgttcttcatcaggggcgcacatgtacctccagaaaaggaagtgagggatgggaaaagagccaagtttgctgtccaaaattttgaagtgccacatggaaaggtaccagattttgaggcggagatttctacgaataaagatcaagccgcattgtacaggttatctggcgatttcaatcctttacatatcgatcccacgctagccaaagcagttaaatttcctacgccaattctgcatgggctttgtacattaggtattagtgcgaaagcattgtttgaacattatggtccatatgaggagttgaaagtgagatttaccaatgttgttttcccaggtgatactctaaaggttaaagcttggaagcaaggctcggttgtcgtttttcaaacaattgatacgaccagaaacgtcattgtattggataacgccgctgtaaaactatcgcaggcaaaatctaaactataa

SEQ ID NO: 687 - protein, 312 aa, Saccharomyces cerevisiae
MPATLHDSTKILSLNTGAQIPQIGLGTWQSKENDAYKAVLTALKDGYRHIDTAAIYRNEDQVGQAIKDSGVPREEIFVTTKLWCTQHHEPEVALDQSLKRLGLDYVDLYLMHWPARLDPAYIKNEDILSVPTKKDGSRAVDITNWNFIKTWELMQELPKTGKTKAVGVSNFSINNLKDLLASQGNKLTPAANQVEIHPLLPQDELINFCKSKGIVVEAYSPLGSTDAPLLKEPVILEIAKKNNVQPGHVVISWHVQRGYVVLPKSVNPDRIKTNRKIFTLSTEDFEAINNISKEKGEKRVVHPNWSPFEVFK

SEQ ID NO: 688 - DNA, 939 bp, Saccharomyces cerevisiae
  source 1..939: mol_type = other DNA
atgcctgctactttacatgattctacgaaaatcctttctctaaatactggagcccaaatccctcaaataggtttaggtacgtggcagtcgaaagagaacgatgcttataaggctgttttaaccgctttgaaagatggctaccgacacattgatactgctgctatttaccgtaatgaagaccaagtcggtcaagccatcaaggattcaggtgttcctcgggaagaaatctttgttactacaaagttatggtgtacacaacaccacgaacctgaagtagcgctggatcaatcactaaagaggttaggattggactacgtagacttatatttgatgcattggcctgccagattagatccagcctacatcaaaaatgaagacatcttgagtgtgccaacaaagaaggatggttctcgtgcagtggatatcaccaattggaatttcatcaaaacctgggaattaatgcaggaactaccaaagactggtaaaactaaggccgttggagtctccaacttttctataaataacctgaaagatctattagcatctcaaggtaataagcttacgccagctgctaaccaagtcgaaatacatccattactacctcaagacgaattgattaatttttgtaaaagtaaaggcattgtggttgaagcttattctccgttaggtagtaccgatgctccactattgaaggaaccggttatccttgaaattgcgaagaaaaataacgttcaacccggacacgttgttattagctggcacgtccaaagaggttatgttgtcttgccaaaatctgtgaatcccgatcgaatcaaaacgaacaggaaaatatttactttgtctactgaggactttgaagctatcaataacatatcgaaggaaaagggcgaaaaaagggttgtacatccaaattggtctcctttcgaagtattcaagtaa

SEQ ID NO: 689 - protein, 391 aa, Saccharomyces cerevisiae
MSAAADRLNLTSGHLNAGRKRSSSSVSLKAAEKPFKVTVIGSGNWGTTIAKVVAENCKGYPEVFAPIVQMWVFEEEINGEKLTEIINTRHQNVKYLPGITLPDNLVANPDLIDSVKDVDIIVFNIPHQFLPRICSQLKGHVDSHVRAISCLKGFEVGAKGVQLLSSYITEELGIQCGALSGANIATEVAQEHWSETTVAYHIPKDFRGEGKDVDHKVLKALFHRPYFHVSVIEDVAGISICGALKNVVALGCGFVEGLGWGNNASAAIQRVGLGEIIRFGQMFFPESREETYYQESAGVADLITTCAGGRNVKVARLMATSGKDAWECEKELLNGQSAQGLITCKEVHEWLETCGSVEDFPLFEAVYQIVYNNYPMKNLPDMIEELDLHED

SEQ ID NO: 690 - DNA, 1176 bp, Saccharomyces cerevisiae
  source 1..1176: mol_type = other DNA
atgtctgctgctgctgatagattaaacttaacttccggccacttgaatgctggtagaaagagaagttcctcttctgtttctttgaaggctgccgaaaagcctttcaaggttactgtgattggatctggtaactggggtactactattgccaaggtggttgccgaaaattgtaagggatacccagaagttttcgctccaatagtacaaatgtgggtgttcgaagaagagatcaatggtgaaaaattgactgaaatcataaatactagacatcaaaacgtgaaatacttgcctggcatcactctacccgacaatttggttgctaatccagacttgattgattcagtcaaggatgtcgacatcatcgttttcaacattccacatcaatttttgccccgtatctgtagccaattgaaaggtcatgttgattcacacgtcagagctatctcctgtctaaagggttttgaagttggtgctaaaggtgtccaattgctatcctcttacatcactgaggaactaggtattcaatgtggtgctctatctggtgctaacattgccaccgaagtcgctcaagaacactggtctgaaacaacagttgcttaccacattccaaaggatttcagaggcgagggcaaggacgtcgaccataaggttctaaaggccttgttccacagaccttacttccacgttagtgtcatcgaagatgttgctggtatctccatctgtggtgctttgaagaacgttgttgccttaggttgtggtttcgtcgaaggtctaggctggggtaacaacgcttctgctgccatccaaagagtcggtttgggtgagatcatcagattcggtcaaatgtttttcccagaatctagagaagaaacatactaccaagagtctgctggtgttgctgatttgatcaccacctgcgctggtggtagaaacgtcaaggttgctaggctaatggctacttctggtaaggacgcctgggaatgtgaaaaggagttgttgaatggccaatccgctcaaggtttaattacctgcaaagaagttcacgaatggttggaaacatgtggctctgtcgaagacttcccattatttgaagccgtataccaaatcgtttacaacaactacccaatgaagaacctgccggacatgattgaagaattagatctacatgaagattag

SEQ ID NO: 691 - protein, 799 aa, Saccharomyces cerevisiae
MVLPILPLIDDLASWNSKKEYVSLVGQVLLDGSSLSNEEILQFSKEEEVPLVALSLPSGKFSDDEIIAFLNNGVSSLFIASQDAKTAEHLVEQLNVPKERVVVEENGVFSNQFMVKQKFSQDKIVSIKKLSKDMLTKEVLGEVRTDRPDGLYTTLVVDQYERCLGLVYSSKKSIAKAIDLGRGVYYSRSRNEIWIKGETSGNGQKLLQISTDCDSDALKFIVEQENVGFCHLETMSCFGEFKHGLVGLESLLKQRLQDAPEESYTRRLFNDSALLDAKIKEEAEELTEAKGKKELSWEAADLFYFALAKLVANDVSLKDVENNLNMKHLKVTRRKGDAKPKFVGQPKAEEEKLTGPIHLDVVKASDKVGVQKALSRPIQKTSEIMHLVNPIIENVRDKGNSALLEYTEKFDGVKLSNPVLNAPFPEEYFEGLTEEMKEALDLSIENVRKFHAAQLPTETLEVETQPGVLCSRFPRPIEKVGLYIPGGTAILPSTALMLGVPAQVAQCKEIVFASPPRKSDGKVSPEVVYVAEKVGASKIVLAGGAQAVAAMAYGTETIPKVDKILGPGNQFVTAAKMYVQNDTQALCSIDMPAGPSEVLVIADEDADVDFVASDLLSQAEHGIDSQVILVGVNLSEKKIQEIQDAVHNQALQLPRVDIVRKCIAHSTIVLCDGYEEALEMSNQYAPEHLILQIANANDYVKLVDNAGSVFVGAYTPESCGDYSSGTNHTLPTYGYARQYSGANTATFQKFITAQNITPEGLENIGRAVMCVAKKEGLDGHRNAVKIRMSKLGLIPKDFQ

SEQ ID NO: 692 - DNA, 2400 bp, Saccharomyces cerevisiae
  source 1..2400: mol_type = other DNA
atggttttgccgattctaccgttaattgatgatctggcctcatggaatagtaagaaggaatacgtttcacttgttggtcaggtacttttggatggctcgagcctgagtaatgaagagattctccagttctccaaagaggaagaagttccattggtggctttgtccttgccaagtggtaaattcagcgatgatgaaatcattgccttcttgaacaacggagtttcttctctgttcattgctagccaagatgctaaaacagccgaacacttggttgaacaattgaatgtaccaaaggagcgtgttgttgtggaagagaacggtgttttctccaatcaattcatggtaaaacaaaaattctcgcaagataaaattgtgtccataaagaaattaagcaaggatatgttgaccaaagaagtgcttggtgaagtacgtacagaccgtcctgacggtttatataccaccctagttgtcgaccaatatgagcgttgtctagggttggtgtattcttcgaagaaatctatagcaaaggccatcgatttgggtcgtggcgtttattattctcgttctaggaatgaaatctggatcaagggtgaaacttctggcaatggccaaaagcttttacaaatctctactgactgtgattcggatgccttaaagtttatcgttgaacaagaaaacgttggattttgccacttggagaccatgtcttgctttggtgaattcaagcatggtttggtggggctagaatctttactaaaacaaaggctacaggacgctccagaggaatcttatactagaagactattcaacgactctgcattgttagatgccaagatcaaggaagaagctgaagaactgactgaggcaaagggtaagaaggagctttcttgggaggctgccgatttgttctactttgcactggccaaattagtggccaacgatgtttcattgaaggacgtcgagaataatctgaatatgaagcatctgaaggttacaagacggaaaggtgatgctaagccaaagtttgttggacaaccaaaggctgaagaagaaaaactgaccggtccaattcacttggacgtggtgaaggcttccgacaaagttggtgtgcagaaggctttgagcagaccaatccaaaagacttctgaaattatgcatttagtcaatccgatcatcgaaaatgttagagacaaaggtaactctgcccttttggagtacacagaaaagtttgatggtgtaaaattatccaatcctgttcttaatgctccattcccagaagaatactttgaaggtttaaccgaggaaatgaaggaagctttggacctttcaattgaaaacgtccgcaaattccatgctgctcaattgccaacagagactcttgaagttgaaacccaacctggtgtcttgtgttccagattccctcgtcctattgaaaaagttggtttgtatatccctggtggcactgccattttaccaagtactgcattaatgcttggtgttccagcacaagttgcccaatgtaaggagattgtgtttgcatctccaccaagaaaatctgatggtaaagtttcacccgaagttgtttatgtcgcagaaaaagttggcgcttccaagattgttctagctggtggtgcccaagccgttgctgctatggcttacgggacagaaactattcctaaagtggataagatcttgggtccaggtaatcaatttgtgactgccgccaaaatgtatgttcaaaatgacactcaagctctatgttccattgatatgccagctggcccaagtgaagttttggttattgccgatgaagatgccgatgtggattttgttgcaagtgatttgctatcgcaagctgaacacggtattgactcccaagttatccttgttggtgttaacttgagcgaaaagaaaattcaagagattcaagatgctgtccacaatcaagctttacaactgccacgtgtggatattgttcgtaaatgtattgctcacagtacgatcgttctttgtgacggttacgaagaagcccttgaaatgtccaaccaatatgcaccagaacatttgattctacaaatcgccaatgctaacgattatgttaaattggttgacaatgcagggtccgtatttgtgggtgcttacactccagaatcgtgcggtgactattcaagtggtactaaccatacattaccaacctatggttacgctaggcagtacagtggtgccaacactgcaaccttccaaaagtttatcactgcccaaaacattacccctgaaggtttagaaaacatcggtagagctgttatgtgcgttgccaagaaggagggtctagacggtcacagaaacgctgtgaaaatcagaatgagtaagcttgggttgatcccaaaggatttccagtag

SEQ ID NO: 693 - protein, 428 aa, Saccharomyces cerevisiae
MSMLSRRLFSTSRLAAFSKIKVKQPVVELDGDEMTRIIWDKIKKKLILPYLDVDLKYYDLSVESRDATSDKITQDAAEAIKKYGVGIKCATITPDEARVKEFNLHKMWKSPNGTIRNILGGTVFREPIVIPRIPRLVPRWEKPIIIGRHAHGDQYKATDTLIPGPGSLELVYKPSDPTTAQPQTLKVYDYKGSGVAMAMYNTDESIEGFAHSSFKLAIDKKLNLFLSTKNTILKKYDGRFKDIFQEVYEAQYKSKFEQLGIHYEHRLIDDMVAQMIKSKGGFIMALKNYDGDVQSDIVAQGFGSLGLMTSILVTPDGKTFESEAAHGTVTRHYRKYQKGEETSTNSIASIFAWSRGLLKRGELDNTPALCKFANILESATLNTVQQDGIMTKDLALACGNNERSAYVTTEEFLDAVEKRLQKEIKSIE

SEQ ID NO: 694 - DNA, 1287 bp, Saccharomyces cerevisiae
  source 1..1287: mol_type = other DNA
atgagtatgttatctagaagattattttccacctctcgccttgctgctttcagtaagattaaggtcaaacaacccgttgtcgagttggacggtgatgaaatgacccgtatcatttgggataagatcaagaagaaattgattctaccctacttggacgtagatttgaagtactacgacttatctgtcgaatctcgtgacgccacctccgacaagattactcaggatgctgctgaggcgatcaagaagtatggtgttggtatcaaatgtgccaccatcactcctgatgaagctcgtgtgaaggaattcaacctgcacaagatgtggaaatctcctaatggtaccatcagaaacattctcggcggtacagtgttcagagagcccattgtgattcctagaattcctagactggtcccacgttgggaaaaaccaatcattattggaagacacgcccacggtgatcaatataaagctacggacacactgatcccaggcccaggatctttggaactggtctacaagccatccgaccctacgactgctcaaccacaaactttgaaagtgtatgactacaagggcagtggtgtggccatggccatgtacaatactgacgaatccatcgaagggtttgctcattcgtctttcaagctggccattgacaaaaagctaaatcttttcttgtcaaccaagaacactattttgaagaaatatgacggtcggttcaaagacattttccaagaagtttatgaagctcaatataaatccaaattcgaacaactagggatccactatgaacaccgtttaattgatgatatggtcgctcaaatgataaaatctaaaggtggctttatcatggcgctaaagaactatgacggtgatgtccaatctgacatcgtcgctcaaggatttggctccttaggtttgatgacttctatcttagttacaccagacggtaaaactttcgaaagtgaagctgctcatggtaccgtgacaagacattatagaaagtaccaaaagggtgaagaaacttctacaaactccattgcatccattttcgcgtggtcgagaggtctattgaagagaggtgaattggacaatactcctgctttgtgtaaatttgccaatattttggaatccgccactttgaacacagttcagcaagacggtatcatgacgaaggacttggctttggcttgcggtaacaacgaaagatctgcttatgttaccacagaagaatttttggatgccgttgaaaaaagactacaaaaagaaatcaagtcgatcgagtaa

SEQ ID NO: 695 - protein, 371 aa, Saccharomyces cerevisiae
MFRSVATRLSACRGLASNAARKSLTIGLIPGDGIGKEVIPAGKQVLENLNSKHGLSFNFIDLYAGFQTFQETGKALPDETVKVLKEQCQGALFGAVQSPTTKVEGYSSPIVALRREMGLFANVRPVKSVEGEKGKPIDMVIVRENTEDLYIKIEKTYIDKATGTRVADATKRISEIATRRIATIALDIALKRLQTRGQATLTVTHKSNVLSQSDGLFREICKEVYESNKDKYGQIKYNEQIVDSMVYRLFREPQCFDVIVAPNLYGDILSDGAAALVGSLGVVPSANVGPEIVIGEPCHGSAPDIAGKGIANPIATIRSTALMLEFLGHNEAAQDIYKAVDANLREGSIKTPDLGGKASTQQVVDDVLSRL

SEQ ID NO: 696 - DNA, 1116 bp, Saccharomyces cerevisiae
  source 1..1116: mol_type = other DNA
atgtttagatctgttgctactagattatctgcctgccgtgggttagcatctaacgctgctcgcaaatcactcactattggtcttatccccggtgacggtatcggtaaggaagtcattcctgctggtaagcaagttttggaaaaccttaactccaagcacggcctaagcttcaactttattgatctctacgccggtttccaaacattccaagaaacaggaaaggcgttgcctgatgagactgttaaagtgttgaaggaacaatgtcaaggtgctcttttcggtgcagttcagtctccaactactaaggtggaaggttactcctcaccaattgttgctctaaggagggaaatgggccttttcgctaatgttcgtcctgttaagtctgtagagggagaaaagggtaaaccaattgacatggttatcgtcagagaaaatactgaggacctgtacattaaaattgaaaaaacatacattgacaaggccacaggtacaagagttgctgatgccacaaagagaatatccgaaattgcaacaagaagaattgcaaccattgcattagatattgccttgaaaagattacaaacaagaggccaagccactttgacagtgactcataaatcaaatgttctatctcaaagtgatggtctattcagagaaatctgtaaggaagtctacgaatctaacaaggacaagtacggtcaaatcaaatataacgaacaaattgtggattccatggtttataggctgttcagagaaccacaatgttttgatgtgatagtggcaccaaacctatacggggatatattatctgacggtgctgctgctttagtcggttcattaggtgttgttccaagcgccaacgtaggtccagaaattgtcattggtgaaccatgccatggttctgcaccagatattgctggtaaaggtattgctaacccaatcgccactataagatctactgctttgatgttggaattcttgggccacaacgaagctgcccaagatatctacaaggctgttgatgctaacttaagagagggttctatcaagacaccagatttaggtggtaaggcttctactcaacaagtcgttgacgacgttttgtcgagattatag

SEQ ID NO: 697 - protein, 469 aa, Saccharomyces cerevisiae
MSYSAADNLQDSFQRAMNFSGSPGAVSTSPTQSFMNTLPRRVSITKQPKALKPFSTGDMNILLLENVNATAIKIFKDQGYQVEFHKSSLPEDELIEKIKDVHAIGIRSKTRLTEKILQHARNLVCIGCFCIGTNQVDLKYAASKGIAVFNSPFSNSRSVAELVIGEIISLARQLGDRSIELHTGTWNKVAARCWEVRGKTLGIIGYGHIGSQLSVLAEAMGLHVLYYDIVTIMALGTARQVSTLDELLNKSDFVTLHVPATPETEKMLSAPQFAAMKDGAYVINASRGTVVDIPSLIQAVKANKIAGAALDVYPHEPAKNGEGSFNDELNSWTSELVSLPNIILTPHIGGSTEEAQSSIGIEVATALSKYINEGNSVGSVNFPEVSLKSLDYDQENTVRVLYIHRNVPGVLKTVNDILSDHNIEKQFSDSHGEIAYLMADISSVNQSEIKDIYEKLNQTSAKVSIRLLY

SEQ ID NO: 698 - DNA, 1410 bp, Saccharomyces cerevisiae
  source 1..1410: mol_type = other DNA
atgtcttattcagctgccgataatttacaagattcattccaacgtgccatgaacttttctggctctcctggtgcagtctcaacctcaccaactcagtcatttatgaacacactacctcgtcgtgtaagcattacaaagcaaccaaaggctttaaaacctttttctactggtgacatgaatattctactgttggaaaatgtcaatgcaactgcaatcaaaatcttcaaggatcagggttaccaagtagagttccacaagtcttctctacctgaggatgaattgattgaaaaaatcaaagacgtacacgctatcggtataagatccaaaactagattgactgaaaaaatactacagcatgccaggaatctagtttgtattggttgtttttgcataggtaccaatcaagtagacctaaaatatgccgctagtaaaggtattgctgttttcaattcgccattctccaattcaagatccgtagcagaattggtaattggtgagatcattagtttagcaagacaattaggtgatagatccattgaactgcatacaggtacatggaataaagtcgctgctaggtgttgggaagtaagaggaaaaactctcggtattattgggtatggtcacattggttcgcaattatcagttcttgcagaagctatgggcctgcatgtgctatactatgatatcgtgacaattatggccttaggtactgccagacaagtttctacattagatgaattgttgaataaatctgattttgtaacactacatgtaccagctactccagaaactgaaaaaatgttatctgctccacaattcgctgctatgaaggacggggcttatgttattaatgcctcaagaggtactgtcgtggacattccatctctgatccaagccgtcaaggccaacaaaattgcaggtgctgctttagatgtttatccacatgaaccagctaagaacggtgaaggttcatttaacgatgaacttaacagctggacttctgagttggtttcattaccaaatataatcctgacaccacatattggtggctctacagaagaagctcaaagttcaatcggtattgaggtggctactgcattgtccaaatacatcaatgaaggtaactctgtcggttctgtgaacttcccagaagtcagtttgaagtctttggactacgatcaagagaacacagtacgtgtcttgtatattcatcgtaacgttcctggtgttttgaagaccgttaatgatatcttatccgatcataatatcgagaaacagttttctgattctcacggcgagatcgcttatctaatggcagacatctcttctgttaatcaaagtgaaatcaaggatatatatgaaaagttgaaccaaacttctgccaaagtttccatcaggttattatactaa

SEQ ID NO: 699 - protein, 505 aa, Saccharomyces cerevisiae
MSEGPVKFEKNTVISVFGASGDLAKKKTFPALFGLFREGYLDPSTKIFGYARSKLSMEEDLKSRVLPHLKKPHGEADDSKVEQFFKMVSYISGNYDTDEGFDELRTQIEKFEKSANVDVPHRLFYLALPPSVFLTVAKQIKSRVYAENGITRVIVEKPFGHDLASARELQKNLGPLFKEEELYRIDHYLGKELVKNLLVLRFGNQFLNASWNRDNIQSVQISFKERFGTEGRGGYFDSIGIIRDVMQNHLLQIMTLLTMERPVSFDPESIRDEKVKVLKAVAPIDTDDVLLGQYGKSEDGSKPAYVDDDTVDKDSKCVTFAAMTFNIENERWEGVPIMMRAGKALNESKVEIRLQYKAVASGVFKDIPNNELVIRVQPDAAVYLKFNAKTPGLSNATQVTDLNLTYASRYQDFWIPEAYEVLIRDALLGDHSNFVRDDELDISWGIFTPLLKHIERPDGPTPEIYPYGSRGPKGLKEYMQKHKYVMPEKHPYAWPVTKPEDTKDN

SEQ ID NO: 700 - DNA, 1518 bp, Saccharomyces cerevisiae
  source 1..1518: mol_type = other DNA
atgagtgaaggccccgtcaaattcgaaaaaaataccgtcatatctgtctttggtgcgtcaggtgatctggcaaagaagaagacttttcccgccttatttgggcttttcagagaaggttaccttgatccatctaccaagatcttcggttatgcccggtccaaattgtccatggaggaggacctgaagtcccgtgtcctaccccacttgaaaaaacctcacggtgaagccgatgactctaaggtcgaacagttcttcaagatggtcagctacatttcgggaaattacgacacagatgaaggcttcgacgaattaagaacgcagatcgagaaattcgagaaaagtgccaacgtcgatgtcccacaccgtctcttctatctggccttgccgccaagcgtttttttgacggtggccaagcagatcaagagtcgtgtgtacgcagagaatggcatcacccgtgtaatcgtagagaaacctttcggccacgacctggcctctgccagggagctgcaaaaaaacctggggcccctctttaaagaagaagagttgtacagaattgaccattacttgggtaaagagttggtcaagaatcttttagtcttgaggttcggtaaccagtttttgaatgcctcgtggaatagagacaacattcaaagcgttcagatttcgtttaaagagaggttcggcaccgaaggccgtggcggctatttcgactctataggcataatcagagacgtgatgcagaaccatctgttacaaatcatgactctcttgactatggaaagaccggtgtcttttgacccggaatctattcgtgacgaaaaggttaaggttctaaaggccgtggcccccatcgacacggacgacgtcctcttgggccagtacggtaaatctgaggacgggtctaagcccgcctacgtggatgatgacactgtagacaaggactctaaatgtgtcacttttgcagcaatgactttcaacatcgaaaacgagcgttgggagggcgtccccatcatgatgcgtgccggtaaggctttgaatgagtccaaggtggagatcagactgcagtacaaagcggtcgcatcgggtgtcttcaaagacattccaaataacgaactggtcatcagagtgcagcccgatgccgctgtgtacctaaagtttaatgctaagacccctggtctgtcaaatgctacccaagtcacagatctgaatctaacttacgcaagcaggtaccaagacttttggattccagaggcttacgaggtgttgataagagacgccctactgggtgaccattccaactttgtcagagatgacgaattggatatcagttggggcatattcaccccattactgaagcacatagagcgtccggacggtccaacaccggaaatttacccctacggatcaagaggtccaaagggattgaaggaatatatgcaaaaacacaagtatgttatgcccgaaaagcacccttacgcttggcccgtgactaagccagaagatacgaaggataattag

SEQ ID NO: 701 - protein, 342 aa, Saccharomyces cerevisiae
MVLVKQVRLGNSGLKISPIVIGCMSYGSKKWADWVIEDKTQIFKIMKHCYDKGLRTFDTADFYSNGLSERIIKEFLEYYSIKRETVVIMTKIYFPVDETLDLHHNFTLNEFEELDLSNQRGLSRKHIIAGVENSVKRLGTYIDLLQIHRLDHETPMKEIMKALNDVVEAGHVRYIGASSMLATEFAELQFTADKYGWFQFISSQSYYNLLYREDERELIPFAKRHNIGLLPWSPNARGMLTRPLNQSTDRIKSDPTFKSLHLDNLEEEQKEIINRVEKVSKDKKVSMAMLSIAWVLHKGCHPIVGLNTTARVDEAIAALQVTLTEEEIKYLEEPYKPQRQRC

SEQ ID NO: 702 - DNA, 1029 bp, Saccharomyces cerevisiae
  source 1..1029: mol_type = other DNA
atggttttagttaagcaggtaagactcggtaactcaggtcttaagatatcaccgatagtgataggatgtatgtcatacgggtccaagaaatgggcggactgggtcatagaggacaagacccaaattttcaagattatgaagcattgttacgataaaggtcttcgtacttttgacacagcagatttttattctaatggtttgagtgaaagaataattaaggagtttctggagtactacagtataaagagagaaacggtggtgattatgaccaaaatttacttcccagttgatgaaacgcttgatttgcatcataacttcactttaaatgaatttgaagaattggacttgtccaaccagcggggtttatccagaaagcatataattgctggtgtcgagaactctgtgaaaagactgggcacatatatagaccttttacaaattcacagattagatcatgaaacgccaatgaaagagatcatgaaggcattgaatgatgttgttgaagcgggccacgttagatacattggggcttcgagtatgttggcaactgaatttgcagaactgcagttcacagccgataaatatggctggtttcagttcatttcttcgcagtcttactacaatttgctctatcgtgaagatgaacgcgaattgattccttttgccaaaagacacaatattggtttacttccatggtctcctaacgcacgaggcatgttgactcgtcctctgaaccaaagcacggacaggattaagagtgatccaactttcaagtcgttacatttggataatctcgaagaagaacaaaaggaaattataaatcgtgtggaaaaggtgtcgaaggacaaaaaagtctcgatggctatgctctccattgcatgggttttgcataaaggatgtcaccctattgtgggattgaacactacagcaagagtagacgaagcgattgccgcactacaagtaactctaacagaagaagagataaagtacctcgaggagccctacaaaccccagaggcaaagatgttaa

SEQ ID NO: 703 - protein, 344 aa, Saccharomyces cerevisiae
MSSSVASTENIVENMLHPKTTEIYFSLNNGVRIPALGLGTANPHEKLAETKQAVKAAIKAGYRHIDTAWAYETEPFVGEAIKELLEDGSIKREDLFITTKVWPVLWDEVDRSLNESLKALGLEYVDLLLQHWPLCFEKIKDPKGISGLVKTPVDDSGKTMYAADGDYLETYKQLEKIYLDPNDHRVRAIGVSNFSIEYLERLIKECRVKPTVNQVETHPHLPQMELRKFCFMHDILLTAYSPLGSHGAPNLKIPLVKKLAEKYNVTGNDLLISYHIRQGTIVIPRSLNPVRISSSIEFASLTKDELQELNDFGEKYPVRFIDEPFAAILPEFTGNGPNLDNLKY

SEQ ID NO: 704 - DNA, 1035 bp, Saccharomyces cerevisiae
  source 1..1035: mol_type = other DNA
atgtcttcttcagtagcctcaaccgaaaacatagtcgaaaatatgttgcatccaaagactacagaaatatacttttcactcaacaatggtgttcgtatcccagcactgggtttggggacagcaaatcctcacgaaaagttagctgaaacaaaacaagccgtaaaagctgcaatcaaagctggatacaggcacattgatactgcttgggcctacgagacagagccattcgtaggtgaagccatcaaggagttattagaagatggatctatcaaaagggaggatcttttcataaccacaaaagtgtggccggttctatgggacgaagtggacagatcattgaatgaatctttgaaagctttaggcttggaatacgtcgacttgctcttgcaacattggccgctatgttttgaaaagattaaggaccctaaggggatcagcggactggtgaagactccggttgatgattctggaaaaacaatgtatgctgccgacggtgactatttagaaacttacaagcaattggaaaaaatttaccttgatcctaacgatcatcgtgtgagagccattggtgtctcaaatttttccattgagtatttggaacgtctcattaaggaatgcagagttaagccaacggtgaaccaagtggaaactcaccctcacttaccacaaatggaactaagaaagttctgctttatgcacgacattctgttaacagcatactcaccattaggttcccatggcgcaccaaacttgaaaatcccactagtgaaaaagcttgccgaaaagtacaatgtcacaggaaatgacttgctaatttcttaccatattagacaaggcactatcgtaattccgagatccttgaatccagttaggatttcctcgagtattgaattcgcatctttgacaaaggatgaattacaagagttgaacgacttcggtgaaaaatacccagtgagattcatcgatgagccatttgcagccatccttccagagtttactggtaacggaccaaacttggacaatttaaagtattaa

SEQ ID NO: 705 - protein, 532 aa, Saccharomyces cerevisiae
MSNDGSKILNYTPVSKIDEIVEISRNFFFEKQLKLSHENNPRKKDLEFRQLQLKKLYYAVKDHEEELIDAMYKDFHRNKIESVLNETTKLMNDILHLIEILPKLIKPRRVSDSSPPFMFGKTIVEKISRGSVLIIAPFNFPLLLAFAPLAAALAAGNTIVLKPSELTPHTAVVMENLLTTAGFPDGLIQVVQGAIDETTRLLDCGKFDLIFYTGSPRVGSIVAEKAAKSLTPCVLELGGKSPTFITENFKASNIKIALKRIFFGAFGNSGQICVSPDYLLVHKSIYPKVIKECESVLNEFYPSFDEQTDFTRMIHEPAYKKAVASINSTNGSKIVPSKISINSDTEDLCLVPPTIVYNIGWDDPLMKQENFAPVLPIIEYEDLDETINKIIEEHDTPLVQYIFSDSQTEINRILTRLRSGDCVVGDTVIHVGITDAPFGGIGTSGYGNYGGYYGFNTFSHERTIFKQPYWNDFTLFMRYPPNSAQKEKLVRFAMERKPWFDRNGNNKWGLRQYFSLSAAVILISTIYAHCSS

SEQ ID NO: 706 - DNA, 1599 bp, Saccharomyces cerevisiae
  source 1..1599: mol_type = other DNA
atgtcaaacgacggctcaaaaatattgaattataccccagtgtctaaaatagatgaaatagttgaaatctcaagaaatttcttctttgagaaacaattgaaattgtcccacgaaaataacccaaggaaaaaagatctagaattcaggcagttgcagttgaaaaaactctattatgccgtcaaagatcatgaggaagaactgatcgatgctatgtacaaggactttcatcggaacaaaattgaatcggttctgaatgaaacgaccaaacttatgaacgatatacttcacctaattgagattttaccaaaattgatcaaacctcggagagtatctgattcttctcctccatttatgtttggtaaaacaatcgtggagaaaatatcaaggggcagtgtcttgattattgctcctttcaattttcccctacttttagcatttgccccattggcagcagctcttgctgcaggtaacaccattgttctgaagccaagtgaactaacaccacacactgctgtagttatggaaaatttgttaaccacagctggtttccctgatggattgattcaagtagttcagggagctatagatgaaactacaagactactagattgtggaaaatttgacctaatattctacacaggttctccccgtgtcggatcaatagttgctgagaaagcagcaaaaagtctaacaccttgtgtacttgaacttggtggtaaatcacctacctttattacagaaaatttcaaagcaagtaacataaaaattgctttgaaaaggattttttttggtgctttcggaaattctggccagatttgtgtttcaccagattatttgttagtacataaatctatctatccaaaagtcattaaagagtgtgaatcagtactaaatgaattttatccaagctttgatgaacaaacagatttcactcgtatgattcatgagcctgcttacaaaaaggccgttgcaagtataaactcaactaacggctccaagattgtgccttcaaaaatttctatcaattcagatactgaggatctatgccttgtaccaccaaccatagtttataacattggttgggatgatcctttgatgaaacaggaaaactttgctcctgtattgcccatcattgagtacgaggatcttgatgagaccattaacaagataatagaagaacatgacactccattggtgcaatacatattctctgatagccaaactgaaataaatcgtatcttgacgcgcttaagatctggtgactgtgttgtcggtgatacagtgattcatgtaggaattaccgacgctccatttggagggatcggtacttcaggttatggtaactatggtggatattatggattcaatacctttagtcatgaaagaacaatttttaaacaaccatattggaatgattttaccctttttatgagataccctccaaatagcgcacaaaaggaaaagctcgtccgttttgcgatggaaagaaaaccttggtttgacagaaatggcaataacaagtgggggttacgccaatatttttcattatctgccgccgttattttaattagtaccatttacgctcattgttcttcctga

SEQ ID NO: 707 - protein, 312 aa, Saccharomyces cerevisiae
MPATLKNSSATLKLNTGASIPVLGFGTWRSVDNNGYHSVIAALKAGYRHIDAAAIYLNEEEVGRAIKDSGVPREEIFITTKLWGTEQRDPEAALNKSLKRLGLDYVDLYLMHWPVPLKTDRVTDGNVLCIPTLEDGTVDIDTKEWNFIKTWELMQELPKTGKTKAVGVSNFSINNIKELLESPNNKVVPATNQIEIHPLLPQDELIAFCKEKGIVVEAYSPFGSANAPLLKEQAIIDMAKKHGVEPAQLIISWSIQRGYVVLAKSVNPERIVSNFKIFTLPEDDFKTISNLSKVHGTKRVVDMKWGSFPIFQ

SEQ ID NO: 708 - DNA, 939 bp, Saccharomyces cerevisiae
  source 1..939: mol_type = other DNA
atgcctgctacgttaaagaattcttctgctacattaaaactaaatactggtgcctccattccagtgttgggtttcggcacttggcgttccgttgacaataacggttaccattctgtaattgcagctttgaaagctggatacagacacattgatgctgcggctatctatttgaatgaagaagaagttggcagggctattaaagattccggagtccctcgtgaggaaatttttattactactaagctttggggtacggaacaacgtgatccggaagctgctctaaacaagtctttgaaaagactaggcttggattatgttgacctatatctgatgcattggccagtgcctttgaaaaccgacagagttactgatggtaacgttctgtgcattccaacattagaagatggcactgttgacatcgatactaaggaatggaattttatcaagacgtgggagttgatgcaagagttgccaaagacgggcaaaactaaagccgttggtgtctctaatttttctattaacaacattaaagaattattagaatctccaaataacaaggtggtaccagctactaatcaaattgaaattcatccattgctaccacaagacgaattgattgccttttgtaaggaaaagggtattgttgttgaagcctactcaccatttgggagtgctaatgctcctttactaaaagagcaagcaattattgatatggctaaaaagcacggcgttgagccagcacagcttattatcagttggagtattcaaagaggctacgttgttctggccaaatcggttaatcctgaaagaattgtatccaattttaagattttcactctgcctgaggatgatttcaagactattagtaacctatccaaagtgcatggtacaaagagagtcgttgatatgaagtggggatccttcccaattttccaatga

SEQ ID NO: 709 - protein, 519 aa, Saccharomyces cerevisiae
MFSRSTLCLKTSASSIGRLQLRYFSHLPMTVPIKLPNGLEYEQPTGLFINNKFVPSKQNKTFEVINPSTEEEICHIYEGREDDVEEAVQAADRAFSNGSWNGIDPIDRGKALYRLAELIEQDKDVIASIETLDNGKAISSSRGDVDLVINYLKSSAGFADKIDGRMIDTGRTHFSYTKRQPLGVCGQIIPWNFPLLMWAWKIAPALVTGNTVVLKTAESTPLSALYVSKYIPQAGIPPGVINIVSGFGKIVGEAITNHPKIKKVAFTGSTATGRHIYQSAAAGLKKVTLELGGKSPNIVFADAELKKAVQNIILGIYYNSGEVCCAGSRVYVEESIYDKFIEEFKAASESIKVGDPFDESTFQGAQTSQMQLNKILKYVDIGKNEGATLITGGERLGSKGYFIKPTVFGDVKEDMRIVKEEIFGPVVTVTKFKSADEVINMANDSEYGLAAGIHTSNINTALKVADRVNAGTVWINTYNDFHHAVPFGGFNASGLGREMSVDALQNYLQVKAVRAKLDE

SEQ ID NO: 710 - DNA, 1560 bp, Saccharomyces cerevisiae
  source 1..1560: mol_type = other DNA
atgttcagtagatctacgctctgcttaaagacgtctgcatcctccattgggagacttcaattgagatatttctcacaccttcctatgacagtgcctatcaagctgcccaatgggttggaatatgagcaaccaacggggttgttcatcaacaacaagtttgttccttctaaacagaacaagaccttcgaagtcattaacccttccacggaagaagaaatatgtcatatttatgaaggtagagaggacgatgtggaagaggccgtgcaggccgccgaccgtgccttctctaatgggtcttggaacggtatcgaccctattgacaggggtaaggctttgtacaggttagccgaattaattgaacaggacaaggatgtcattgcttccatcgagactttggataacggtaaagctatctcttcctcgagaggagatgttgatttagtcatcaactatttgaaatcttctgctggctttgctgataaaattgatggtagaatgattgatactggtagaacccatttttcttacactaagagacagcctttgggtgtttgtgggcagattattccttggaatttcccactgttgatgtgggcctggaagattgcccctgctttggtcaccggtaacaccgtcgtgttgaagactgccgaatccaccccattgtccgctttgtatgtgtctaaatacatcccacaggcgggtattccacctggtgtgatcaacattgtatccgggtttggtaagattgtgggtgaggccattacaaaccatccaaaaatcaaaaaggttgccttcacagggtccacggctacgggtagacacatttaccagtccgcagccgcaggcttgaaaaaagtgactttggagctgggtggtaaatcaccaaacattgtcttcgcggacgccgagttgaaaaaagccgtgcaaaacattatccttggtatctactacaattctggtgaggtctgttgtgcgggttcaagggtgtatgttgaagaatctatttacgacaaattcattgaagagttcaaagccgcttctgaatccatcaaggtgggcgacccattcgatgaatctactttccaaggtgcacaaacctctcaaatgcaactaaacaaaatcttgaaatacgttgacattggtaagaatgaaggtgctactttgattaccggtggtgaaagattaggtagcaagggttacttcattaagccaactgtctttggtgacgttaaggaagacatgagaattgtcaaagaggaaatctttggccctgttgtcactgtaaccaaattcaaatctgccgacgaagtcattaacatggcgaacgattctgaatacgggttggctgctggtattcacacctctaatattaataccgccttaaaagtggctgatagagttaatgcgggtacggtctggataaacacttataacgatttccaccacgcagttcctttcggtgggttcaatgcatctggtttgggcagggaaatgtctgttgatgctttacaaaactacttgcaagttaaagcggtccgtgccaaattggacgagtaa

SEQ ID NO: 711 - protein, 350 aa, Saccharomyces cerevisiae
MSKKPIVLKLGKDAFGDQAWGELEKIADVITIPESTTREQFLREVKDPQNKLSQVQVITRTARSVKNTGRFDEELALALPSSVVAVCHTGAGYDQIDVEPFKKRHIQVANVPDLVSNATADTHVFLLLGALRNFGIGNRRLIEGNWPEAGPACGSPFGYDPEGKTVGILGLGRIGRCILERLKPFGFENFIYHNRHQLPSEEEHGCEYVGFEEFLKRSDIVSVNVPLNHNTHHLINAETIEKMKDGVVIVNTARGAVIDEQAMTDALRSGKIRSAGLDVFEYEPKISKELLSMSQVLGLPHMGTHSVETRKKMEELVVENAKNVILTGKVLTIVPELQNEDWPNESKPLV

SEQ ID NO: 712 - DNA, 1053 bp, Saccharomyces cerevisiae
  source 1..1053: mol_type = other DNA
atgagtaagaaaccaattgttttgaaattaggaaaggatgcctttggtgaccaagcctggggggaattggaaaagattgcggatgtaattaccatccctgaatccaccactagagaacagtttttgcgggaggtaaaagacccacaaaataagctctcccaagtacaagtcattactagaacagcaaggagtgtgaaaaacaccggtagatttgatgaagagcttgctcttgctttgccctcctccgtagtggctgtatgtcatactggtgctggttatgaccaaattgatgttgagccattcaagaaaaggcacatccaggttgccaatgttcctgatttagttagcaatgctaccgctgatacgcatgtatttttgctattgggtgccctaagaaacttcggtattggtaacagaaggttgatcgagggaaactggccggaggcaggacccgcatgtggttctccctttggatacgaccctgaagggaaaacagttggtatactgggtctaggtaggattggtcgttgtattttagagagattgaagccgtttgggttcgagaatttcatatatcataacagacaccagcttccttccgaagaagagcatggttgtgaatatgtaggattcgaggagtttttgaagcgttctgatatagtatctgtaaacgtcccactgaaccacaatactcaccatctaatcaatgcagagactattgaaaaaatgaaagatggtgtagttattgttaacacagcgcgtggtgccgtgatagacgaacaagccatgactgatgctttgcgttctggaaagattagaagtgctggtttggacgttttcgaatatgagccaaaaatatccaaagagttattatcgatgtcccaagtcttaggactgcctcatatgggcacacatagtgtagaaacaagaaagaaaatggaagaactggtcgttgaaaatgcaaagaatgtgatattgaccgggaaagtcttgactattgttccggaattacaaaatgaagactggcccaatgaatctaagccattagtttga

SEQ ID NO: 713 - protein, 342 aa, Saccharomyces cerevisiae
MSVFVSGANGFIAQHIVDLLLKEDYKVIGSARSQEKAENLTEAFGNNPKFSMEVVPDISKLDAFDHVFQKHGKDIKIVLHTASPFCFDITDSERDLLIPAVNGVKGILHSIKKYAADSVERVVLTSSYAAVFDMAKENDKSLTFNEESWNPATWESCQSDPVNAYCGSKKFAEKAAWEFLEENRDSVKFELTAVNPVYVFGPQMFDKDVKKHLNTSCELVNSLMHLSPEDKIPELFGGYIDVRDVAKAHLVAFQKRETIGQRLIVSEARFTMQDVLDILNEDFPVLKGNIPVGKPGSGATHNTLGATLDNKKSKKLLGFKFRNLKETIDDTASQILKFEGRI

SEQ ID NO: 714 - DNA, 1029 bp, Saccharomyces cerevisiae
  source 1..1029: mol_type = other DNA
atgtcagttttcgtttcaggtgctaacgggttcattgcccaacacattgtcgatctcctgttgaaggaagactataaggtcatcggttctgccagaagtcaagaaaaggccgagaatttaacggaggcctttggtaacaacccaaaattctccatggaagttgtcccagacatatctaagctggacgcatttgaccatgttttccaaaagcacggcaaggatatcaagatagttctacatacggcctctccattctgctttgatatcactgacagtgaacgcgatttattaattcctgctgtgaacggtgttaagggaattctccactcaattaaaaaatacgccgctgattctgtagaacgtgtagttctcacctcttcttatgcagctgtgttcgatatggcaaaagaaaacgataagtctttaacatttaacgaagaatcctggaacccagctacctgggagagttgccaaagtgacccagttaacgcctactgtggttctaagaagtttgctgaaaaagcagcttgggaatttctagaggagaatagagactctgtaaaattcgaattaactgccgttaacccagtttacgtttttggtccgcaaatgtttgacaaagatgtgaaaaaacacttgaacacatcttgcgaactcgtcaacagcttgatgcatttatcaccagaggacaagataccggaactatttggtggatacattgatgttcgtgatgttgcaaaggctcatttagttgccttccaaaagagggaaacaattggtcaaagactaatcgtatcggaggccagatttactatgcaggatgttctcgatatccttaacgaagacttccctgttctaaaaggcaatattccagtggggaaaccaggttctggtgctacccataacacccttggtgctactcttgataataaaaagagtaagaaattgttaggtttcaagttcaggaacttgaaagagaccattgacgacactgcctcccaaattttaaaatttgagggcagaatataa

SEQ ID NO: 715 - protein, 327 aa, Saccharomyces cerevisiae
MSSLVTLNNGLKMPLVGLGCWKIDKKVCANQIYEAIKLGYRLFDGACDYGNEKEVGEGIRKAISEGLVSRKDIFVVSKLWNNFHHPDHVKLALKKTLSDMGLDYLDLYYIHFPIAFKYVPFEEKYPPGFYTGADDEKKGHITEAHVPIIDTYRALEECVDEGLIKSIGVSNFQGSLIQDLLRGCRIKPVALQIEHHPYLTQEHLVEFCKLHDIQVVAYSSFGPQSFIEMDLQLAKTTPTLFENDVIKKVSQNHPGSTTSQVLLRWATQRGIAVIPKSSKKERLLGNLEIEKKFTLTEQELKDISALNANIRFNDPWTWLDGKFPTFA

SEQ ID NO: 716 - DNA, 984 bp, Saccharomyces cerevisiae
  source 1..984: mol_type = other DNA
atgtcttcactggttactcttaataacggtctgaaaatgcccctagtcggcttagggtgctggaaaattgacaaaaaagtctgtgcgaatcaaatttatgaagctatcaaattaggctaccgtttattcgatggtgcttgcgactacggcaacgaaaaggaagttggtgaaggtatcaggaaagccatctccgaaggtcttgtttctagaaaggatatatttgttgtttcaaagttatggaacaattttcaccatcctgatcatgtaaaattagctttaaagaagaccttaagcgatatgggacttgattatttagacctgtattatattcacttcccaatcgccttcaaatatgttccatttgaagagaaataccctccaggattctatacgggcgcagatgacgagaagaaaggtcacatcaccgaagcacatgtaccaatcatagatacgtaccgggctctggaagaatgtgttgatgaaggcttgattaagtctattggtgtttccaactttcagggaagcttgattcaagatttattacgtggttgtagaatcaagcccgtggctttgcaaattgaacaccatccttatttgactcaagaacacctagttgagttttgtaaattacacgatatccaagtagttgcttactcctccttcggtcctcaatcattcattgagatggacttacagttggcaaaaaccacgccaactctgttcgagaatgatgtaatcaagaaggtctcacaaaaccatccaggcagtaccacttcccaagtattgcttagatgggcaactcagagaggcattgccgtcattccaaaatcttccaagaaggaaaggttacttggcaacctagaaatcgaaaaaaagttcactttaacggagcaagaattgaaggatatttctgcactaaatgccaacatcagatttaatgatccatggacctggttggatggtaaattccccacttttgcctga

SEQ ID NO: 717 - protein, 344 aa, Saccharomyces cerevisiae
MSNTVLVSGASGFIALHILSQLLKQDYKVIGTVRSHEKEAKLLRQFQHNPNLTLEIVPDISHPNAFDKVLQKRGREIRYVLHTASPFHYDTTEYEKDLLIPALEGTKNILNSIKKYAADTVERVVVTSSCTAIITLAKMDDPSVVFTEESWNEATWESCQIDGINAYFASKKFAEKAAWEFTKENEDHIKFKLTTVNPSLLFGPQLFDEDVHGHLNTSCEMINGLIHTPVNASVPDFHSIFIDVRDVALAHLYAFQKENTAGKRLVVTNGKFGNQDILDILNEDFPQLRGLIPLGKPGTGDQVIDRGSTTDNSATRKILGFEFRSLHESVHDTAAQILKKQNRL

SEQ ID NO: 718 - DNA, 1035 bp, Saccharomyces cerevisiae
  source 1..1035: mol_type = other DNA
atgtctaatacagttctagtttctggcgcttcaggttttattgccttgcatatcctgtcacaattgttaaaacaagattataaggttattggaactgtgagatcccatgaaaaagaagcaaaattgctaagacaatttcaacataaccctaatttaactttagaaattgttccggacatttctcatccaaatgctttcgataaggttctgcagaaacgtggacgtgagattaggtatgttctacacacggcctctccttttcattatgatactaccgaatatgaaaaagacttattgattcccgcgttagaaggtacaaaaaacatcctaaattctatcaagaaatatgcagcagacactgtagagcgtgttgttgtgacttcttcttgtactgctattataacccttgcaaagatggacgatcccagtgtggtttttacagaagagagttggaacgaagcaacctgggaaagctgtcaaattgatgggataaatgcttactttgcatccaagaagtttgctgaaaaggctgcctgggagttcacaaaagagaatgaagatcacatcaaattcaaactaacaacagtcaacccttctcttctttttggtcctcaacttttcgatgaagatgtgcatggccatttgaatacttcttgcgaaatgatcaatggcctaattcataccccagtaaatgccagtgttcctgattttcattccatttttattgatgtaagggatgtggccctagctcatctgtatgctttccagaaggaaaataccgcgggtaaaagattagtggtaactaacggtaaatttggaaaccaagatatcctggatattttgaacgaagattttccacaattaagaggtctcattcctttgggtaagcctggcacaggtgatcaagtcattgaccgcggttcaactacagataatagtgcaacgaggaaaatacttggctttgagttcagaagtttacacgaaagtgtccatgatactgctgcccaaattttgaagaagcagaacagattatga

SEQ ID NO: 719 - protein, 376 aa, Saccharomyces cerevisiae
MQVAIPETMKAVVIEDGKAVVKEGIPIPELEEGFVLIKTLAVAGNPTDWAHIDYKIGPQGSILGCDAAGQIVKLGPAVNPKDFSIGDYIYGFIHGSSVRFPSNGAFAEYSAISTVVAYKSPNELKFLGEDVLPAGPVRSLEGVATIPVSLTTAGLVLTYNLGLDLKWEPSTPQRKGPILLWGGATAVGQSLIQLANKLNGFTKIIVVASRKHEKLLKEYGADELFDYHDIDVVEQIKHKYNNISYLVDCVANQDTLQQVYKCAADKQDATIVELKNLTEENVKKENRRQNVTIDIIRLYSIGGHEVPFGNITLPADSEARKAAIKFIKFINPKINDGQIRHIPVRVYKNGLCDVPHILKDIKYGKNSGEKLVAVLN

SEQ ID NO: 720 - DNA, 1131 bp, Saccharomyces cerevisiae
  source 1..1131: mol_type = other DNA
atgcaagttgcaattccagaaaccatgaaggctgtcgtcattgaagacggtaaagcggttgttaaagagggcattcccattcctgaattggaagaaggattcgtattgattaagacactcgctgttgctggtaaccccactgattgggcacacattgactacaagatcgggcctcaaggatctattctgggatgtgatgctgctggccaaattgtcaaattgggcccagctgtcaatcctaaagacttttctatcggtgattatatttatgggttcattcacggatcttccgtaaggtttccttccaatggtgcttttgctgaatattctgctatttcaactgtggttgcctacaaatcacccaatgaactcaaatttttgggtgaggatgttctacctgccggccctgtcaggtctttggaaggtgtagccactatcccagtgtcactgaccacagccggcttggtgttgacctataacttgggcttggacctgaagtgggagccatcaaccccacaaagaaaaggccccatcttattatggggcggtgcaactgcagtaggtcagtcgctcatccaattagccaataaattgaatggcttcaccaagatcattgttgtggcttctcggaagcacgaaaaacttttgaaagaatatggtgctgatgaattatttgattatcatgatattgacgtggtagaacaaattaaacacaagtacaacaatatctcgtatttagtcgactgtgtcgcgaatcaagatacgcttcaacaagtgtacaaatgtgcggccgataaacaggatgctacaattgttgaattaaaaaatttgacagaagaaaacgtcaaaaaagagaacaggagacaaaacgttactattgacataataaggctatattcaataggtggccatgaagtaccatttggaaacattactttaccagccgactcagaagctaggaaagctgcaataaaatttatcaaattcatcaatccaaagattaatgatggacaaattcgccatattccagtaagggtctataagaacgggctttgtgatgttcctcatatcctaaaagacatcaaatatggtaagaactctggtgaaaaactcgttgccgtattaaactag

SEQ ID NO: 721 - protein, 347 aa, Saccharomyces cerevisiae
MTTDTTVFVSGATGFIALHIMNDLLKAGYTVIGSGRSQEKNDGLLKKFNNNPKLSMEIVEDIAAPNAFDEVFKKHGKEIKIVLHTASPFHFETTNFEKDLLTPAVNGTKSILEAIKKYAADTVEKVIVTSSTAALVTPTDMNKGDLVITEESWNKDTWDSCQANAVAAYCGSKKFAEKTAWEFLKENKSSVKFTLSTINPGFVFGPQMFADSLKHGINTSSGIVSELIHSKVGGEFYNYCGPFIDVRDVSKAHLVAIEKPECTGQRLVLSEGLFCCQEIVDILNEEFPQLKGKIATGEPATGPSFLEKNSCKFDNSKTKKLLGFQFYNLKDCIVDTAAQMLEVQNEA

SEQ ID NO: 722 - DNA, 1044 bp, Saccharomyces cerevisiae
  source 1..1044: mol_type = other DNA
atgactactgataccactgttttcgtttctggcgcaaccggtttcattgctctacacattatgaacgatctgttgaaagctggctatacagtcatcggctcaggtagatctcaagaaaaaaatgatggcttgctcaaaaaatttaataacaatcccaaactatcgatggaaattgtggaagatattgctgctccaaacgcctttgatgaagttttcaaaaaacatggtaaggaaattaagattgtgctacacactgcctccccattccattttgaaactaccaattttgaaaaggatttactaacccctgcagtgaacggtacaaaatctatcttggaagcgattaaaaaatatgctgcagacactgttgaaaaagttattgttacttcgtctactgctgctctggtgacacctacagacatgaacaaaggagatttggtgatcacggaggagagttggaataaggatacatgggacagttgtcaagccaacgccgttgccgcatattgtggctcgaaaaagtttgctgaaaaaactgcttgggaatttcttaaagaaaacaagtctagtgtcaaattcacactatccactatcaatccgggattcgtttttggtcctcaaatgtttgcagattcgctaaaacatggcataaatacctcctcagggatcgtatctgagttaattcattccaaggtaggtggagaattttataattactgtggcccatttattgacgtgcgtgacgtttctaaagcccacctagttgcaattgaaaaaccagaatgtaccggccaaagattagtattgagtgaaggtttattctgctgtcaagaaatcgttgacatcttgaacgaggaattccctcaattaaagggcaagatagctacaggtgaacctgcgaccggtccaagctttttagaaaaaaactcttgcaagtttgacaattctaagacaaaaaaactactgggattccagttttacaatttaaaggattgcatagttgacaccgcggcgcaaatgttagaagttcaaaatgaagcctaa

SEQ ID NO: 723 - protein, 348 aa, Saccharomyces cerevisiae
MTTEKTVVFVSGATGFIALHVVDDLLKTGYKVIGSGRSQEKNDGLLKKFKSNPNLSMEIVEDIAAPNAFDKVFQKHGKEIKVVLHIASPVHFNTTDFEKDLLIPAVNGTKSILEAIKNYAADTVEKVVITSSVAALASPGDMKDTSFVVNEESWNKDTWESCQANAVSAYCGSKKFAEKTAWDFLEENQSSIKFTLSTINPGFVFGPQLFADSLRNGINSSSAIIANLVSYKLGDNFYNYSGPFIDVRDVSKAHLLAFEKPECAGQRLFLCEDMFCSQEALDILNEEFPQLKGKIATGEPGSGSTFLTKNCCKCDNRKTKNLLGFQFNKFRDCIVDTASQLLEVQSKS

SEQ ID NO: 724 - DNA, 1047 bp, Saccharomyces cerevisiae
  source 1..1047: mol_type = other DNA
atgactactgaaaaaaccgttgtttttgtttctggtgctactggtttcattgctctacacgtagtggacgatttattaaaaactggttacaaggtcatcggttcgggtaggtcccaagaaaagaatgatggattgctgaaaaaatttaagagcaatcccaacctttcaatggagattgtcgaagacattgctgctccaaacgcttttgacaaagtttttcaaaagcacggcaaagagatcaaggttgtcttgcacatagcttctccggttcacttcaacaccactgatttcgaaaaggatctgctaattcctgctgtgaatggtaccaagtccattctagaagcaatcaaaaattatgccgcagacacagtcgaaaaagtcgttattacttcttctgttgctgcccttgcatctcccggagatatgaaggacactagtttcgttgtcaatgaggaaagttggaacaaagatacttgggaaagttgtcaagctaacgcggtttccgcatactgtggttccaagaaatttgctgaaaaaactgcttgggattttctcgaggaaaaccaatcaagcatcaaatttacgctatcaaccatcaacccaggatttgtttttggccctcagctatttgccgactctcttagaaatggaataaatagctcttcagccattattgccaatttggttagttataaattaggcgacaatttttataattacagtggtccttttattgacgttcgcgatgtttcaaaagctcatttacttgcatttgagaaacccgaatgcgctggccaaagactattcttatgtgaagatatgttttgctctcaagaagcgctggatatcttgaatgaggaatttccacagttaaaaggcaagatagcaactggcgaacctggtagcggctcaacctttttgacaaaaaactgctgcaagtgcgacaaccgcaaaaccaaaaatttattaggattccaatttaataagttcagagattgcattgtcgatactgcctcgcaattactagaagttcaaagtaaaagctaa

SEQ ID NO: 725 - protein, 368 aa, Saccharomyces cerevisiae
MKAVVIEDGKAVVKEGVPIPELEEGFVLIKTLAVAGNPTDWAHIDYKVGPQGSILGCDAAGQIVKLGPAVDPKDFSIGDYIYGFIHGSSVRFPSNGAFAEYSAISTVVAYKSPNELKFLGEDVLPAGPVRSLEGAATIPVSLTTAGLVLTYNLGLNLKWEPSTPQRNGPILLWGGATAVGQSLIQLANKLNGFTKIIVVASRKHEKLLKEYGADQLFDYHDIDVVEQIKHKYNNISYLVDCVANQNTLQQVYKCAADKQDATVVELTNLTEENVKKENRRQNVTIDRTRLYSIGGHEVPFGGITFPADPEARRAATEFVKFINPKISDGQIHHIPARVYKNGLYDVPRILEDIKIGKNSGEKLVAVLN

SEQ ID NO: 726 - DNA, 1107 bp, Saccharomyces cerevisiae
  source 1..1107: mol_type = other DNA
atgaaggctgtcgtcattgaagacggtaaagcggttgtcaaagagggcgttcccattcctgaattggaagaaggattcgtattgattaagacactcgctgttgctggtaacccgactgattgggcacacattgactacaaggtcgggcctcaaggatctattctgggatgtgacgctgccggccaaattgtcaaattgggcccagccgtcgatcctaaagacttttctattggtgattatatttatgggttcattcacggatcttccgtaaggtttccttccaatggtgcttttgctgaatattctgctatttcaactgtggttgcctacaaatcacccaatgaactcaaatttttgggtgaagatgttctacctgccggccctgtcaggtctttggaaggggcagccactatcccagtgtcactgaccacagctggcttggtgttgacctataacttgggcttgaacctgaagtgggagccatcaaccccacaaagaaacggccccatcttattatggggcggtgcaactgcagtaggtcagtcgctcatccaattagccaataaattgaatggcttcaccaagatcattgttgtggcttctcggaaacacgaaaaactgttgaaagaatatggtgctgatcaactatttgattaccatgatattgacgtggtagaacaaattaaacacaagtacaacaatatctcgtatttagtcgactgtgtcgcgaatcaaaatacgcttcaacaagtgtacaaatgtgcggccgataaacaggatgctaccgttgtcgaattaactaatttgacagaagaaaacgtcaaaaaggagaataggaggcaaaatgtcactattgacagaacaagactgtattcaataggcggccatgaagtaccatttggtggcattactttccctgctgacccagaagccaggagagctgccaccgaattcgtcaagttcatcaatccaaagattagtgatgggcaaattcaccatattccagcaagggtctataagaacgggctttacgatgttcctcgtatcctggaagacattaaaatcggtaagaactctggtgaaaaactagttgccgtattaaactag

SEQ ID NO: 727 - protein, 1054 aa, Saccharomyces cerevisiae
MPPLFKGLKQMAKPIAYVSRFSAKRPIHIILFSLIISAFAYLSVIQYYFNGWQLDSNSVFETAPNKDSNTLFQECSHYYRDSSLDGWVSITAHEASELPAPHHYYLLNLNFNSPNETDSIPELANTVFEKDNTKYILQEDLSVSKEISSTDGTKWRLRSDRKSLFDVKTLAYSLYDVFSENVTQADPFDVLIMVTAYLMMFYTIFGLFNDMRKTGSNFWLSASTVVNSASSLFLALYVTQCILGKEVSALTLFEGLPFIVVVVGFKHKIKIAQYALEKFERVGLSKRITTDEIVFESVSEEGGRLIQDHLLCIFAFIGCSMYAHQLKTLTNFCILSAFILIFELILTPTFYSAILALRLEMNVIHRSTIIKQTLEEDGVVPSTARIISKAEKKSVSSFLNLSVVVIIMKLSVILLFVFINFYNFGANWVNDAFNSLYFDKERVSLPDFITSNASENFKEQAIVSVTPLLYYKPIKSYQRIEDMVLLLLRNVSVAIRDRFVSKLVLSALVCSAVINVYLLNAARIHTSYTADQLVKTEVTKKSFTAPVQKASTPVLTNKTVISGSKVKSLSSAQSSSSGPSSSSEEDDSRDIESLDKKIRPLEELEALLSSGNTKQLKNKEVAALVIHGKLPLYALEKKLGDTTRAVAVRRKALSILAEAPVLASDRLPYKNYDYDRVFGACCENVIGYMPLPVGVIGPLVIDGTSYHIPMATTEGCLVASAMRGCKAINAGGGATTVLTKDGMTRGPVVRFPTLKRSGACKIWLDSEEGQNAIKKAFNSTSRFARLQHIQTCLAGDLLFMRFRTTTGDAMGMNMISKGVEYSLKQMVEEYGWEDMEVVSVSGNYCTDKKPAAINWIEGRGKSVVAEATIPGDVVRKVLKSDVSALVELNIAKNLVGSAMAGSVGGFNAHAANLVTAVFLALGQDPAQNVESSNCITLMKEVDGDLRISVSMPSIEVGTIGGGTVLEPQGAMLDLLGVRGPHATAPGTNARQLARIVACAVLAGELSLCAALAAGHLVQSHMTHNRKPAEPTKPNNLDATDINRLKDGSVTCIKS

SEQ ID NO: 728 - DNA, 3165 bp, Saccharomyces cerevisiae
  source 1..3165: mol_type = other DNA
atgccgccgctattcaagggactgaaacagatggcaaagccaattgcctatgtttcaagattttcggcgaaacgaccaattcatataatacttttttctctaatcatatccgcattcgcttatctatccgtcattcagtattacttcaatggttggcaactagattcaaatagtgtttttgaaactgctccaaataaagactccaacactctatttcaagaatgttcccattactacagagattcctctctagatggttgggtatcaatcaccgcgcatgaagctagtgagttaccagccccacaccattactatctattaaacctgaacttcaatagtcctaatgaaactgactccattccagaactagctaacacggtttttgagaaagataatacaaaatatattctgcaagaagatctcagtgtttccaaagaaatttcttctactgatggaacgaaatggaggttaagaagtgacagaaaaagtcttttcgacgtaaagacgttagcatattctctctacgatgtattttcagaaaatgtaacccaagcagacccgtttgacgtccttattatggttactgcctacctaatgatgttctacaccatattcggcctcttcaatgacatgaggaagaccgggtcaaatttttggttgagcgcctctacagtggtcaattctgcatcatcacttttcttagcattgtatgtcacccaatgtattctaggcaaagaagtttccgcattaactctttttgaaggtttgcctttcattgtagttgttgttggtttcaagcacaaaatcaagattgcccagtatgccctggagaaatttgaaagagtcggtttatctaaaaggattactaccgatgaaatcgtttttgaatccgtgagcgaagagggtggtcgtttgattcaagaccatttgctttgtatttttgcctttatcggatgctctatgtatgctcaccaattgaagactttgacaaacttctgcatattatcagcatttatcctaatttttgaattgattttaactcctacattttattctgctatcttagcgcttagactggaaatgaatgttatccacagatctactattatcaagcaaacattagaagaagacggtgttgttccatctacagcaagaatcatttctaaagcagaaaagaaatccgtatcttctttcttaaatctcagtgtggttgtcattatcatgaaactctctgtcatactgttgtttgtcttcatcaacttttataactttggtgcaaattgggtcaatgatgccttcaattcattgtacttcgataaggaacgtgtttctctaccagattttattacctcgaatgcctctgaaaactttaaagagcaagctattgttagtgtcaccccattattatattacaaacccattaagtcctaccaacgcattgaggatatggttcttctattgcttcgtaatgtcagtgttgccattcgtgataggttcgtcagtaaattagttctttccgccttagtatgcagtgctgtcatcaatgtgtatttattgaatgctgctagaattcataccagttatactgcagaccaattggtgaaaactgaagtcaccaagaagtcttttactgctcctgtacaaaaggcttctacaccagttttaaccaataaaacagtcatttctggatcgaaagtcaaaagtttatcatctgcgcaatcgagctcatcaggaccttcatcatctagtgaggaagatgattcccgcgatattgaaagcttggataagaaaatacgtcctttagaagaattagaagcattattaagtagtggaaatacaaaacaattgaagaacaaagaggtcgctgccttggttattcacggtaagttacctttgtacgctttggagaaaaaattaggtgatactacgagagcggttgcggtacgtaggaaggctctttcaattttggcagaagctcctgtattagcatctgatcgtttaccatataaaaattatgactacgaccgcgtatttggcgcttgttgtgaaaatgttataggttacatgcctttgcccgttggtgttataggccccttggttatcgatggtacatcttatcatataccaatggcaactacagagggttgtttggtagcttctgccatgcgtggctgtaaggcaatcaatgctggcggtggtgcaacaactgttttaactaaggatggtatgacaagaggcccagtagtccgtttcccaactttgaaaagatctggtgcctgtaagatatggttagactcagaagagggacaaaacgcaattaaaaaagcttttaactctacatcaagatttgcacgtctgcaacatattcaaacttgtctagcaggagatttactcttcatgagatttagaacaactactggtgacgcaatgggtatgaatatgatttctaaaggtgtcgaatactcattaaagcaaatggtagaagagtatggctgggaagatatggaggttgtctccgtttctggtaactactgtaccgacaaaaaaccagctgccatcaactggatcgaaggtcgtggtaagagtgtcgtcgcagaagctactattcctggtgatgttgtcagaaaagtgttaaaaagtgatgtttccgcattggttgagttgaacattgctaagaatttggttggatctgcaatggctgggtctgttggtggatttaacgcacatgcagctaatttagtgacagctgttttcttggcattaggacaagatcctgcacaaaatgttgaaagttccaactgtataacattgatgaaagaagtggacggtgatttgagaatttccgtatccatgccatccatcgaagtaggtaccatcggtggtggtactgttctagaaccacaaggtgccatgttggacttattaggtgtaagaggcccgcatgctaccgctcctggtaccaacgcacgtcaattagcaagaatagttgcctgtgccgtcttggcaggtgaattatccttatgtgctgccctagcagccggccatttggttcaaagtcatatgacccacaacaggaaacctgctgaaccaacaaaacctaacaatttggacgccactgatataaatcgtttgaaagatgggtccgtcacctgcattaaatcctaa

SEQ ID NO: 729 - protein, 334 aa, Saccharomyces cerevisiae
MASKTLRVLFLGPKGTYSHQAALQQFQSTSDVEYLPAASIPQCFNQLENDTSIDYSVVPLENSTNGQVVFSYDLLRDRMIKKALSLPAPADTNRITPDIEVIAEQYVPITHCLISPIQLPNGIASLGNFEEVIIHSHPQVWGQVECYLRSMAEKFPQVTFIRLDCSSTSESVNQCIRSSTADCDNILHLAIASETAAQLHKAYIIEHSINDKLGNTTRFLVLKRRENAGDNEVEDTGLLRVNLLTFTTRQDDPGSLVDVLNILKIHSLNMCSINSRPFHLDEHDRNWRYLFFIEYYTEKNTPKNKEKFYEDISDKSKQWCLWGTFPRNERYYHK

SEQ ID NO: 730 - DNA, 1005 bp, Saccharomyces cerevisiae
  source 1..1005: mol_type = other DNA
atggccagcaagactttgagggttctttttctgggtcccaaaggtacgtattcccatcaagctgcattacaacaatttcaatcaacatctgatgttgagtacctcccagcagcctctatcccccaatgttttaaccaattggagaacgacactagtatagattattcagtggtaccgttggaaaattccaccaatggacaagtagttttttcctatgatctcttgcgtgataggatgatcaaaaaagccctatccttacctgctccagcagatactaatagaattacaccagatatagaagttatagcggagcaatatgtacccattacccattgtctaatcagcccaatccaactaccaaatggtattgcatcccttggaaattttgaagaagtcataatacactcacatccgcaagtatggggccaggttgaatgttacttaaggtccatggcagaaaaatttccgcaggtcacctttataagattggattgttcttccacatctgaatcagtgaaccaatgcattcggtcatcaacggccgattgcgacaacattctgcatttagccattgctagtgaaacagctgcccaattgcataaggcgtacatcattgaacattcgataaatgataagctaggaaatacaacaagatttttagtattgaagagaagggagaacgcaggcgacaatgaagtagaagacactggattactacgggttaacctactcacctttactactcgtcaagatgaccctggttctttggtagatgttttgaacatactaaaaatccattcactcaacatgtgttctataaactctagaccattccatttggacgaacatgatagaaactggcgatatttatttttcattgaatattacaccgagaagaataccccaaagaataaagaaaaattctatgaagatatcagcgacaaaagtaaacagtggtgcctgtggggtacattccccagaaatgagagatattatcacaaataa

SEQ ID NO: 731 - protein, 484 aa, Saccharomyces cerevisiae
MSVHAATNPINKHVVLIDNYDSFTWNVYEYLCQEGAKVSVYRNDAITVPEIAALNPDTLLISPGPGHPKTDSGISRDCIRYFTGKIPVFGICMGQQCMFDVFGGEVAYAGEIVHGKTSPISHDNCGIFKNVPQGIAVTRYHSLAGTESSLPSCLKVTASTENGIIMGVRHKKYTVEGVQFHPESILTEEGHLMIRNILNVSGGTWEENKSSPSNSILDRIYARRKIDVNEQSKIPGFTFQDLQSNYDLGLAPPLQDFYTVLSSSHKRAVVLAEVKRASPSKGPICLKAVAAEQALKYAEAGASAISVLTEPHWFHGSLQDLVNVRKILDLKFPPKERPCVLRKEFIFSKYQILEARLAGADTVLLIVKMLSQPLLKELYSYSKDLNMEPLVEVNSKEELQRALEIGAKVVGVNNRDLHSFNVDLNTTSNLVESIPKDVLLIALSGITTRDDAEKYKKEGVHGFLVGEALMKSTDVKKFIHELCE

SEQ ID NO: 732 - DNA, 1455 bp, Saccharomyces cerevisiae
  source 1..1455: mol_type = other DNA
atgtctgtgcacgctgcaacaaacccaatcaataagcatgtggttctaattgacaactacgattcctttacctggaacgtttacgagtacttgtgccaggagggcgccaaagtgagcgtctaccgtaacgatgcaattacagttccagaaattgccgccttgaatcccgacacattgcttatctcgcctggaccaggccacccaaagacagattctggcatttcaagagactgtatccggtactttactgggaaaattcctgtatttggaatctgtatgggccagcaatgcatgtttgacgtatttggtggtgaagttgcctacgctggtgagattgtccacggtaaaacgtccccaatctctcacgacaactgtggaattttcaagaacgtgccgcaaggtattgctgtgacaagataccattcattggccgggacagaatcgtccctaccatcctgcttgaaggttactgcgagtaccgaaaatggaattatcatgggtgtaagacacaagaagtacactgtagaaggtgtgcaatttcatccggaatccatcttgaccgaggaaggtcatctgatgatcaggaacattttaaacgtcagtggaggcacttgggaggaaaacaaatcatctccttcaaattctattttggaccgtatctatgctcggcgtaaaatagacgtcaatgagcagtctaaaatcccaggtttcacctttcaagacttacaatctaactatgatttaggtcttgccccaccgttacaggatttctacacggtgttgtcatcatcccataaaagagccgttgttcttgctgaagtcaagcgtgcctctccatcgaagggacccatttgtttaaaagctgttgctgctgaacaggctctcaaatacgcagaggctggtgcatccgcaatttccgtattgaccgaacctcattggtttcacggttcgttacaggatttagtaaatgtgaggaaaatcctagatttgaaatttcctcccaaggagaggccttgtgttttgagaaaagaatttattttcagcaagtatcaaatactagaagcaagattagctggagctgacactgtccttcttatagtcaagatgctatctcaacccttattgaaggaactgtacagctacagtaaagatttgaacatggaacctctcgttgaggtgaactccaaagaggaattacaaagggctctagaaattggtgctaaagttgtaggtgtcaataatagggacctgcattcattcaacgtagacctaaataccaccagtaacttggtagaatctattccaaaggatgttcttctaattgctctatcgggaattaccaccagggacgatgctgaaaaatacaaaaaagaaggtgtccatggatttttagtgggtgaagccctaatgaaatcaaccgatgtgaagaagttcattcatgaattatgcgaataa

SEQ ID NO: 733 - protein, 593 aa, Lonicera japonica
MEKNEKESMENDEKILTNDEPEINYRGVKAMPLIIGNETFEKLGAIGTLSNLLVYLTTVFNMKSITATTILNVFNGTTNFSTLLGAFLSDTYFGRYKTLGFASIASFLGLLVIDLTAIIKWLHPPHCGAETTKCIGPTPWQMVFLFTGFGLMVIGAAGIRPCNLAFGADQFNPNTDSGKKGINSFFNWYFFTITFAQMVSLTLVVYIQSDVSWAIGLGIPTIFMLVSCVLFFMGTKIYVKVKPEGSPFTSIAQVMAVAAKKRRLKLPEQPWLSLFSYAPSKSINSKLPHTDQFRFLDKAAIVTPEDQINLDGSATDPWRLCSMQQVEEMKCVLRVIPIWASAIIYYVAIIQQQQYVVFQALQSNRHFGNSKFQIPAASYTVFSMLSLTLFIPIYDRILVPQLRKLTGKEGGITLLQRMGVGIILTVLSSLVAAQVEKRRRNLALTRPTLGIQPHRGGISSMSGLWLVPQLAITGLAEAFTNIGQVEFYYKQFPENMRSVAGSFFFCGMAASSYLNSFLVTVVHRTTEGAATGNWLPEDLNKGRLDYFYYMVTGLGVVNSMYFLLCAKWYRYKGTGGSVVGVEMQTKEVDKQVV

SEQ ID NO: 734 - DNA, 1782 bp, Lonicera japonica
  source 1..1782: mol_type = other DNA
atggaaaagaacgagaaagaatccatggaaaacgacgaaaagatcttgactaatgacgaaccagaaatcaactacagaggtgttaaggctatgccattgattattggtaacgaaaccttcgaaaagttgggtgctattggtactttgtccaacttgttggtttacttgactaccgtgttcaacatgaagtctattactgctaccaccatcctgaatgttttcaatggtactaccaacttctctactttgttgggtgcattcttgtctgatacttacttcggtagatacaagactttgggtttcgcttctattgcttctttcttgggtttgttggttattgatttgaccgccattatcaagtggttgcatccacctcattgtggtgctgaaactacaaaatgtattggtccaactccatggcagatggtttttttgtttactggtttcggtttgatggtcattggtgctgctggtattagaccatgtaatttggcttttggtgccgatcaattcaacccaaatactgattctggtaagaagggcatcaactcattcttcaactggtactttttcaccatcaccttcgctcaaatggtttctttgactttggttgtctacatccagtctgatgtttcttgggctattggtttgggtattccaaccattttcatgttggtgtcttgcgtcttgtttttcatgggtactaagatctacgttaaggtcaaaccagaaggttctccattcacatctattgctcaagttatggctgttgctgctaagaagagaagattgaaattgccagaacaaccctggttgtctttgttttcttatgctccatctaagtccatcaactccaaattgccacatactgaccaattcagattcttggataaggctgctatagttactccagaagatcaaatcaacttggatggttctgctactgatccttggagattgtgttctatgcaacaagtcgaagaaatgaagtgcgttttgagagttattccaatttgggcttccgctatcatctactacgttgccattattcaacaacagcagtacgttgttttccaagccttgcaatctaatagacacttcggtaactccaagttccaaattccagctgcttcttacactgtgttctctatgttgtccttgaccttgttcattccaatctacgatagaatcttggtcccacagttgagaaagttgactggtaaagaaggtggtatcaccttgttacaaagaatgggtgttggtatcatcttgaccgttttgtcatctttggttgctgcccaagttgaaaagagaagaagaaatttggcattgaccagaccaacattgggtatacaaccacatagaggtggtatttcttctatgtctggtttgtggttggttccacaattggctattacaggtttggctgaagctttcactaacatcggtcaagttgaattctactacaagcagttcccagaaaacatgagatctgttgctggttcttttttcttctgtggtatggctgcttcctcttacttgaactctttcttagttaccgttgttcacagaactactgaaggtgctgctactggtaattggttgccagaagatttgaacaaaggcagattggactacttttactacatggttaccggtttgggtgttgtcaattctatgtactttttgttgtgcgctaagtggtacaggtacaaaggtactggtggttctgttgttggtgttgaaatgcaaacaaaagaagtcgataagcaggtcgtctga

SEQ ID NO: 735 - protein, 604 aa, Emmonsia crescens
MATSQEVEVQRAADSSAPEKVPVGMDEKSVGAAVYNSSHGSLDNINRQAPTMEELTSLRRIPGKIPWIAFSIAFVELCERFSYYGTTIVFVNYIQRELPPGSTTGASGTNGTPGALGLGQRASTGLTLFNNFWSYIMPLVGAYVADEHLGRFNTIMYSIAIALVGHTILIISAIPPVLKNPNGAVACFAVGIIIMGIGTGGFKSNISPLIAEQYTEEYMFIETTKDGERVIVDPAATISRIYHYFYLMINIGALLGQISMVYAEKYVGFYLSFLLPTCLFTLCPLVLYVLRHKYSRQRPVGSVYGKAWKVWRLATKGQVSWNPATTYRNFHDPDMWERAKPSNIANKPVWMTFDDAWVDEVRRGLRACAVFLWYPLFWLSYNQMLNNLTSQAATMELNGVPNDVISNLNPFTLIIFIPLLDRFFYPTLRKLGINLTPVKRIAIGFVVAGCSMVAAAVTQHYIYKLGPCGKFANDCAADNIPAPISVWVQTVPYVLGGISEIFASVTSLEYAFTKAPKNMRSLVQAVALFTNAISAALGQALVSLSEDPLLEWNYAVTAILAFVGAAGFWISNRGTDKDEDALNNLPAGDCESGANDIENKLTEN

SEQ ID NO: 736 - DNA, 1815 bp, Emmonsia crescens
  source 1..1815: mol_type = other DNA
atggccacctctcaagaagttgaagttcaaagagctgctgattcttctgctccagaaaaagttccagttggtatggacgaaaaatctgttggtgctgctgtttacaattcctctcatggttctttggacaacattaacagacaagctccaactatggaagagttgacttccttgagaagaattccaggtaagattccatggattgctttctccattgctttcgttgaattgtgcgaaaggttttcctattacggtactaccatcgttttcgtcaactacatccaaagagaattgccaccaggttctactactggtgcttctggtactaatggtactccaggtgctttaggtttgggtcaaagagcatctactggtttgactttgtttaacaacttctggtcctacatcatgccattggttggtgcttatgttgctgatgaacatttgggtagattcaacaccatcatgtactctattgctatcgctttggttggtcataccatcttgattatttctgccattccaccagttctgaagaatccaaatggtgctgttgcttgttttgccgttggtattatcattatgggtattggtactggtggcttcaagtctaatatctctccattgattgctgaacagtacaccgaagagtatatgttcattgaaactaccaaggacggtgaaagagttatagttgatccagctgctaccatctctagaatctaccattacttctacctgatgattaacatcggtgctttgttgggtcagatctctatggtttatgccgaaaagtatgtcggcttctacttgtcttttttgttgccaacttgtttgttcacgttgtgtccattggtcttgtatgttttgagacacaagtactccagacaaagacctgttggttctgtttatggtaaagcttggaaagtttggagattggctacaaagggtcaagtttcttggaatccagctactacttacagaaacttccatgatccagatatgtgggaaagagctaagccatctaatattgctaacaagccagtttggatgacctttgatgatgcttgggttgatgaagttagaagaggtttgagagcttgcgctgtttttttgtggtatcctttgttttggctgtcctacaatcagatgttgaacaacttgacttctcaagccgctactatggaattgaatggtgttccaaacgatgtcatctctaacttgaatccattcaccttgatcatcttcatccctttgttggacagattcttctacccaactttgaggaaattgggtatcaatttgaccccagttaagagaatcgctatcggttttgttgttgctggttgttctatggttgctgctgcagttactcaacattacatctacaaattgggtccatgtggtaagttcgctaatgattgtgctgctgataatattccagctccaatttctgtttgggttcaaactgttccatacgtcttaggtggtatctctgaaattttcgcttctgtcacttctttggaatacgcttttacaaaggcccctaagaacatgagatctttggttcaagcagttgctttgttcaccaatgctatttctgctgcattgggtcaagctttggtttctttatctgaagatccactgttggaatggaactatgctgttactgctattttggcttttgttggtgcagcaggtttttggatttctaatagaggtactgacaaggacgaagatgccttgaacaatttgccagctggtgattgtgaatctggtgctaatgatattgagaacaagttgaccgagaactaa

SEQ ID NO: 737 - DNA, 1029 bp, Saccharomyces cerevisiae
  source 1..1029: mol_type = other DNA
atgcatacagctgaatttttggaaacagaaccaacagaaatctcatctgttctagcaggtggttataatcacccactgctgagacagtggcaaagtgagcgtcaactgactaagaacatgttgatttttccgctattcatctccgataatccagatgactttactgaaattgactctctacctaatatcaatagaatcggtgtaaataggctaaaagactacttaaagccattagtggccaagggtttgcgttctgtgatcttgtttggtgtgcctctcatccctggtaccaaggatccagtgggtacagcggctgacgatcctgcagggccagtcattcaaggtattaaattcattcgtgagtatttccctgaactgtatattatttgcgatgtctgtctctgtgaatacacttctcatggccattgcggggttctatacgatgatggtactattaatagagaacgtagtgtctctagattagcagctgtggcagttaactacgctaaagctggtgcgcactgtgtggctcccagtgatatgatcgatggtaggatcagagatattaaacgaggcttaataaatgcaaacttggctcacaagaccttcgtgttatcctatgcagctaagtttagcggtaatctatatgggccattccgtgatgctgcttgttcagctccttcgaatggtgataggaaatgttaccaattacctcctgccggtcgtggcctggcacgtagggcgttggaaagggatatgagtgaaggtgccgacggtattattgttaagccttccactttctacttagatataatgagggatgcaagtgaaatttgtaaagacttaccaatctgcgcatatcacgtgtcgggcgaatacgcaatgttacatgctgcagctgaaaaaggtgttgttgatttgaagacaattgcctttgaatctcatcaaggtttcttgagggcgggtgccagattaatcatcacttatttggctcctgagttcctagactggttagatgaagaaaactaa

SEQ ID NO: 738 - protein, 342 aa, Saccharomyces cerevisiae
MHTAEFLETEPTEISSVLAGGYNHPLLRQWQSERQLTKNMLIFPLFISDNPDDFTEIDSLPNINRIGVNRLKDYLKPLVAKGLRSVILFGVPLIPGTKDPVGTAADDPAGPVIQGIKFIREYFPELYIICDVCLCEYTSHGHCGVLYDDGTINRERSVSRLAAVAVNYAKAGAHCVAPSDMIDGRIRDIKRGLINANLAHKTFVLSYAAKFSGNLYGPFRDAACSAPSNGDRKCYQLPPAGRGLARRALERDMSEGADGIIVKPSTFYLDIMRDASEICKDLPICAYHVSGEYAMLHAAAEKGVVDLKTIAFESHQGFLRAGARLIITYLAPEFLDWLDEEN

SEQ ID NO: 739 - DNA, 984 bp, Saccharomyces cerevisiae
  source 1..984: mol_type = other DNA
atgggccctgaaactctacatattggtgggagaaaatcgaaattggcggtaatacaatccaaccatgttttaaaactgatcgaagaaaagtatccggactacgactgcaaggttttcactttgcaaactcttggtgaccagattcaattcaaacctttgtactcatttggcggtaaagctttatggacaaaggagttggaagaccatctttaccatgacgatccctcaaagaagcttgacttgatcgttcattctctgaaggacatgcccactttactaccagagggtttcgagctggggggtatcactaagcgggtcgatccaacagattgtcttgtcatgcccttttactctgcttataagtctctggatgaccttccagacggggggattgtgggaacctcatccgtgagaagatctgctcagctaaaaagaaaatacccacatttgaaatttgaaagtgtcagaggaaatatacaaactagattacaaaaactagacgacccaaaatctccgtaccaatgcatcatcttggcgtctgctgggttgatgcgtatggggttggaaaacagaattacgcagcgattccattcggatacaatgtaccatgcagttggacaaggcgccctgggtatagaaattagaaagggtgacaccaagatgatgaagattcttgacgaaatttgcgatctaaatgcaactatatgttgcctttcggagcgtgctttgatgagaactttagaggggggttgttccgttcctattggtgtggaatctaaatacaatgaagagactaaaaaattactattaaaggccattgtagttgacgttgaaggcacagaagcagtagaagacgaaattgaaatgctaatagaaaatgttaaagaagattccatggcgtgtggtaagatactagctgaaagaatgattgccgatggcgcaaagaaaattctggatgaaattaatttagacagaatcaaatga

SEQ ID NO: 740 - protein, 327 aa, Saccharomyces cerevisiae
MGPETLHIGGRKSKLAVIQSNHVLKLIEEKYPDYDCKVFTLQTLGDQIQFKPLYSFGGKALWTKELEDHLYHDDPSKKLDLIVHSLKDMPTLLPEGFELGGITKRVDPTDCLVMPFYSAYKSLDDLPDGGIVGTSSVRRSAQLKRKYPHLKFESVRGNIQTRLQKLDDPKSPYQCIILASAGLMRMGLENRITQRFHSDTMYHAVGQGALGIEIRKGDTKMMKILDEICDLNATICCLSERALMRTLEGGCSVPIGVESKYNEETKKLLLKAIVVDVEGTEAVEDEIEMLIENVKEDSMACGKILAERMIADGAKKILDEINLDRIK

SEQ ID NO: 741 - DNA, 1089 bp, Saccharomyces cerevisiae
  source 1..1089: mol_type = other DNA
atgggtaactttccagctccaaaaaacgatttgatattgagagccgcaaagggtgaaaaagtcgagagaccgccatgctggataatgcgccaggcaggtcgttacctgccggaatatcacgaggtgaaaaacaatcgtgatttctttcaaacttgcagggatgcggaaattgcttctgagattactatccagccggtaagacgctatagaggcctcattgatgctgctattatttttagtgatatcttagttattccgcaagccatgggtatgagggtcgagatgctcgaaggtaaaggtccacatttcccagaacctttaagaaatccggaagacctccaaacggtattagactacaaggttgatgttttgaaagagttagattgggctttcaaggcaatcaccatgacaaggatcaagttggatggtgaggttcccttatttggcttttgcgggggaccttggactctaatggtttatatgacggaaggcggtggatcccgtcttttcagatttgccaaacaatggattaacatgtatccagagctttctcacaaattattacaaaaaatcactgatgtggccgtggagtttctgagtcagcaagtcgtggcgggtgctcaaatactacaagtttttgaaagttggggtggtgagctttcgtctgtagattttgatgagttttccctaccatatttaagacaaattgccgaaagagtgcctaaaagattgcaagaattaggtatcatggaacagattcctatgatcgtttttgcgaaagggtcgtggtatgctttggacaagctatgctgttcaggatttgacgttgtttcgttggactggtcctgggacccaagagaagcggtaaaaataaacaagaaccgtgtcaccttgcagggcaacctggatcctggcgtcatgtatggttctaaagaggtaataacaaagaaagttaaacagatgattgaggcttttggaggtgggaagtcccgctacattgttaatttcggtcacggtacccaccctttcatggatccagacgtcatcaagtttttcttggaggagtgccacagaattggttcgaagtaa

SEQ ID NO: 742 - protein, 362 aa, Saccharomyces cerevisiae
MGNFPAPKNDLILRAAKGEKVERPPCWIMRQAGRYLPEYHEVKNNRDFFQTCRDAEIASEITIQPVRRYRGLIDAAIIFSDILVIPQAMGMRVEMLEGKGPHFPEPLRNPEDLQTVLDYKVDVLKELDWAFKAITMTRIKLDGEVPLFGFCGGPWTLMVYMTEGGGSRLFRFAKQWINMYPELSHKLLQKITDVAVEFLSQQVVAGAQILQVFESWGGELSSVDFDEFSLPYLRQIAERVPKRLQELGIMEQIPMIVFAKGSWYALDKLCCSGFDVVSLDWSWDPREAVKINKNRVTLQGNLDPGVMYGSKEVITKKVKQMIEAFGGGKSRYIVNFGHGTHPFMDPDVIKFFLEECHRIGSK

SEQ ID NO: 743 - DNA, 954 bp, Saccharomyces cerevisiae
  source 1..954: mol_type = other DNA
atggaggacagtagcaatacaatcataccctcacccactgacgtgggggcgctagcaaacagaatcaactttcaaaccagagatgcccacaataaaatcaataccttcatgggcataaagatggccatcgccatgagacatggctttatatacagacagggtattctggcgtactattatgtgttcgatgccatcgagcaagagatagatcgcctactgaatgaccccgtaacggaggaggagctgcaaacttcgaccattctgaagcagttttggctcgaagattttagaagatctacgcagatctataaggacctgaagctgctatactcaaacacgtttaaaagcacagaatcattaaacgaattcctggctacgttccagaagccaccgctactacagcagtttatcaataacatccacgaaaacatacacaaggagccatgcaccattctttcttactgtcacgttctgtacttggcgcttttcgccggcggcaagctaatacgatcgaatttgtacagaagactggggctcttccccaacttcgagaagctatcacagaaggaactggtcaaaaagggcacaaacttcttcaccttcagcgatctgggtcccactgaagaaacacgcttgaaatgggaatacaagaagaactatgagctggccaccaggacggaattgaccgaagcacaaaagttgcagatcattagcgtcgcagaaggcatttttgattggaacttcaacatcgttgcagaaattggagagttgaatcgtcgcgagttaatgggcaagttcagcttcaagtgtattacgtacttgtacgaagaatggatgttcaacaaggattctgctactagaagagcactccacacggtcatgctgctggtgctttctattatcgcgatctgggttctttacttcttggtaaagagttttcttagcatagtataa

SEQ ID NO: 744 - protein, 317 aa, Saccharomyces cerevisiae
MEDSSNTIIPSPTDVGALANRINFQTRDAHNKINTFMGIKMAIAMRHGFIYRQGILAYYYVFDAIEQEIDRLLNDPVTEEELQTSTILKQFWLEDFRRSTQIYKDLKLLYSNTFKSTESLNEFLATFQKPPLLQQFINNIHENIHKEPCTILSYCHVLYLALFAGGKLIRSNLYRRLGLFPNFEKLSQKELVKKGTNFFTFSDLGPTEETRLKWEYKKNYELATRTELTEAQKLQIISVAEGIFDWNFNIVAEIGELNRRELMGKFSFKCITYLYEEWMFNKDSATRRALHTVMLLVLSIIAIWVLYFLVKSFLSIV

SEQ ID NO: 745 - DNA, 2049 bp, Saccharomyces cerevisiae
  source 1..2049: mol_type = other DNA
atgtttttcaacagactaagcgctggcaagctgctggtaccactctccgtggtcctgtacgcccttttcgtggtaatattacctttacagaattctttccactcctccaatgttttagttagaggtgccgatgatgtagaaaactacggaactgttatcggtattgacttaggtactacttattcctgtgttgctgtgatgaaaaatggtaagactgaaattcttgctaatgagcaaggtaacagaatcaccccatcttacgtggcattcaccgatgatgaaagattgattggtgatgctgcaaagaaccaagttgctgccaatcctcaaaacaccatcttcgacattaagagattgatcggtttgaaatataacgacagatctgttcagaaggatatcaagcacttgccatttaatgtggttaataaagatgggaagcccgctgtagaagtaagtgtcaaaggagaaaagaaggtttttactccagaagaaatttctggtatgatcttgggtaagatgaaacaaattgccgaagattatttaggcactaaggttacccatgctgtcgttactgttcctgcttatttcaatgacgcgcaaagacaagccaccaaggatgctggtaccatcgctggtttgaacgttttgagaattgttaatgaaccaaccgcagccgccattgcctacggtttggataaatctgataaggaacatcaaattattgtttatgatttgggtggtggtactttcgatgtctctctattgtctattgaaaacggtgttttcgaagtccaagccacttctggtgatactcatttaggtggtgaagattttgactataagatcgttcgtcaattgataaaagctttcaagaagaagcatggtattgatgtgtctgacaacaacaaggccctagctaaattgaagagagaagctgaaaaggctaaacgtgccttgtccagccaaatgtccacccgtattgaaattgactccttcgttgatggtatcgacttaagtgaaaccttgaccagagctaagtttgaggaattaaacctagatctattcaagaagaccttgaagcctgtcgagaaggttttgcaagattctggtttggaaaagaaggatgttgatgatatcgttttggttggtggttctactagaattccaaaggtccaacaattgttagaatcatactttgatggtaagaaggcctccaagggtattaacccagatgaagctgttgcatacggtgcagccgttcaagctggtgtcttatccggtgaagaaggtgtcgaagatattgttttattggatgtcaacgctttgactcttggtattgaaaccactggtggtgtcatgactccattaattaagagaaatactgctattcctacaaagaaatcccaaattttctctactgccgttgacaaccaaccaaccgttatgatcaaggtatacgagggtgaaagagccatgtctaaggacaacaatctattaggtaagtttgaattaaccggcattccaccagcaccaagaggtgtacctcaaattgaagtcacatttgcacttgacgctaatggtattctgaaggtgtctgccacagataagggaactggtaaatccgaatctatcaccatcactaacgataaaggtagattaacccaagaagagattgatagaatggttgaagaggctgaaaaattcgcttctgaagacgcttctatcaaggccaaggttgaatctagaaacaaattagaaaactacgctcactctttgaaaaaccaagttaatggtgacctaggtgaaaaattggaagaagaagacaaggaaaccttattagatgctgctaacgatgttttagaatggttagatgataactttgaaaccgccattgctgaagactttgatgaaaagttcgaatctttgtccaaggtcgcttatccaattacttctaagttgtacggaggtgctgatggttctggtgccgctgattatgacgacgaagatgaagatgacgatggtgattatttcgaacacgacgaattgtag

SEQ ID NO: 746 - protein, 682 aa, Saccharomyces cerevisiae
MFFNRLSAGKLLVPLSVVLYALFVVILPLQNSFHSSNVLVRGADDVENYGTVIGIDLGTTYSCVAVMKNGKTEILANEQGNRITPSYVAFTDDERLIGDAAKNQVAANPQNTIFDIKRLIGLKYNDRSVQKDIKHLPFNVVNKDGKPAVEVSVKGEKKVFTPEEISGMILGKMKQIAEDYLGTKVTHAVVTVPAYFNDAQRQATKDAGTIAGLNVLRIVNEPTAAAIAYGLDKSDKEHQIIVYDLGGGTFDVSLLSIENGVFEVQATSGDTHLGGEDFDYKIVRQLIKAFKKKHGIDVSDNNKALAKLKREAEKAKRALSSQMSTRIEIDSFVDGIDLSETLTRAKFEELNLDLFKKTLKPVEKVLQDSGLEKKDVDDIVLVGGSTRIPKVQQLLESYFDGKKASKGINPDEAVAYGAAVQAGVLSGEEGVEDIVLLDVNALTLGIETTGGVMTPLIKRNTAIPTKKSQIFSTAVDNQPTVMIKVYEGERAMSKDNNLLGKFELTGIPPAPRGVPQIEVTFALDANGILKVSATDKGTGKSESITITNDKGRLTQEEIDRMVEEAEKFASEDASIKAKVESRNKLENYAHSLKNQVNGDLGEKLEEEDKETLLDAANDVLEWLDDNFETAIAEDFDEKFESLSKVAYPITSKLYGGADGSGAADYDDEDEDDDGDYFEHDEL

SEQ ID NO: 747 - DNA, 2130 bp, Saccharomyces cerevisiae
  source 1..2130: mol_type = other DNA
atggctagtgaaacttttgaatttcaagctgaaattactcagttgatgagtttgatcatcaacaccgtctattctaacaaggaaattttcttgagagaactgatatctaatgcctcggatgcgttggataaaattagatacaaatctttgtctgatccaaagcaattggaaacagaaccagatctctttattagaatcactccaaagccagagcaaaaagttttggaaatcagagattctggtattggtatgaccaaggctgaattgattaataacttgggtaccattgccaagtctggtaccaaagccttcatggaagctctatctgctggtgccgatgtatccatgattggtcaattcggtgttggtttttactctttattcttagttgccgacagagttcaggttatttcaaagagcaacgacgacgaacaatacatctgggaatccaacgctggtggttctttcactgttactctagacgaagttaatgaaagaattggtaggggtaccatcttgaggttattcttgaaagatgaccaattggagtacttggaagaaaagagaataaaggaagttatcaagagacattctgagttcgtggcctacccaatccaattagtcgtcaccaaggaagttgaaaaggaagttccaattccagaagaagaaaagaaagacgaggaaaagaaggatgaggaaaagaaggatgaagacgacaagaaaccaaaattggaagaagtcgatgaagaagaggaaaagaagccaaagacgaaaaaagttaaagaagaagttcaagagatagaagaactaaacaagactaagcctttgtggactagaaacccatctgatatcactcaagaagaatacaatgctttctataagtctatttcaaacgactgggaagacccattgtacgttaagcatttctccgttgaaggtcaattggaatttagagctatcttattcattccaaagagagcaccattcgacttgtttgagagtaaaaagaagaagaataatatcaagttgtacgttcgtcgtgttttcatcactgatgaagctgaagacttgattccagagtggttatctttcgtcaagggtgttgttgactctgaggatttaccattgaatttgtccagagaaatgttacaacaaaataagatcatgaaggttattagaaagaacattgtcaaaaagttgattgaagccttcaacgaaattgctgaagactctgaacaatttgaaaagttctactcggctttctccaaaaatatcaagttgggtgtacatgaagatacccaaaacagggctgctttggctaagttgttacgttacaactctaccaagtccgtagatgagttgacttccttaactgattacgttaccagaatgccagaacaccaaaagaacatctactacatcactggtgaatctctaaaggctgtcgaaaagtctccatttttggatgccttgaaggctaaaaacttcgaggttttgttcttgaccgacccaattgatgaatacgccttcactcaattgaaggaattcgaaggtaaaactttggttgacattactaaagatttcgaattggaagaaactgacgaagaaaaagctgaaagagagaaggagatcaaagaatatgaaccattgaccaaggccttgaaagaaattttgggtgaccaagtggagaaagttgttgtttcttacaaattgttggatgccccagctgctatcagaactggtcaatttggttggtctgctaacatggaaagaatcatgaaggctcaagccttgagagactcttccatgtcctcctacatgtcttccaagaagactttcgaaatttctccaaaatctccaattatcaaggaattgaaaaagagagttgacgaaggtggtgctcaagacaagactgtcaaggacttgactaagttattatatgaaactgctttgttgacttccggcttcagtttggacgaaccaacttcctttgcatcaagaattaacagattgatctctttgggtttgaacattgatgaggatgaagaaacagagactgctccagaagcatccaccgcagctccggttgaagaggttccagctgacaccgaaatggaagaggtagattag

SEQ ID NO: 748 - protein, 709 aa, Saccharomyces cerevisiae [sequence omitted]

SEQ ID NO: 749 - DNA, 1509 bp, Saccharomyces cerevisiae
  source 1..1509: mol_type = other DNA
atgaaattttctgcgtatttatggtggctgtttttgaatctagcgttggtgaaaggcacttcattgctatccaacgttacattagcggaagattctttctgggagcattttcaggcttacactaatacaaagcatttaaaccaagagtggatcacaagtgaagccgtcaacaatgaaggctctaaaatatatggtgcacaatggcgactatcacagggtcgattgcaaggatccgcatgggataaaggaatcgcagttcgaacaggcaatgccgcagctatgataggacatctcttggagacacctattaatgtttcagaaacggataccttggttgtccagtacgaaattaagttggacaattctttgacgtgcggcggtgcgtttattaagttaatgtctggtttcatgaatgttgaagcattaaaacactatgcacccgatacagagggtgtcgagttagtttttggtccggattattgtgctcctgaaataaatggcgtgcaatttgccatcaataaggttgacaagatcacacatgaatctaaactaagatatttgcaagagatgcccctgtcaaaattaactgatacctcgcaatctcatctgtatacgctcataatagatgaatcagcgcagtcttttcaaattcttatagacggtaagacggttatggtaagagaacatatcgaagacaagaaaaaggtcaattttgagccacccattacaccgcctttaatgattcctgatgtttcagtagcgaaaccgcatgattgggatgatcgcatccgaatcccagatcctgaggcggtgaagctcagtgatcgggatgaacgagacccattgatgattccacatccagatggcactgaaccaccagaatggaacagctccatccccgaatacattcttgacccaaatgctcaaaagccctcgtggtggaaggaacttgagcacggggaatggataccgcccatgattaaaaatcctctttgcactgcagaacgtggttgtggccagcagataccagggctgataaataatgccaagtacaaaggtccaggcgaactcaatgaaatcataaatcccaattacatgggggaatggcatccaccggaaattgaaaacccgctatactacgaagagcagcacccattgcgcatcgaaaacgttatcagtggtgtgatcctcgagttttggagtggatctccaaacatgttgataagcaacatttatgttggtaaaaatgtaacagaggcgcaaattattgggaataagacttggctgatgagagaccgcgcgtttagaggctccgatggccccacagaacgcaaattcatgaatagcagactaggaaatctacaaacaactttccataacgaaagagaatcccctaatccatttgaccgcattatagatcgcatattagagcaacctctgaaatttgtgcttactgcggccgtcgtgctcttgacgacgtcggttctttgttgtgtagtatttacatag

SEQ ID NO: 750 - protein, 502 aa, Saccharomyces cerevisiae
MKFSAYLWWLFLNLALVKGTSLLSNVTLAEDSFWEHFQAYTNTKHLNQEWITSEAVNNEGSKIYGAQWRLSQGRLQGSAWDKGIAVRTGNAAAMIGHLLETPINVSETDTLVVQYEIKLDNSLTCGGAFIKLMSGFMNVEALKHYAPDTEGVELVFGPDYCAPEINGVQFAINKVDKITHESKLRYLQEMPLSKLTDTSQSHLYTLIIDESAQSFQILIDGKTVMVREHIEDKKKVNFEPPITPPLMIPDVSVAKPHDWDDRIRIPDPEAVKLSDRDERDPLMIPHPDGTEPPEWNSSIPEYILDPNAQKPSWWKELEHGEWIPPMIKNPLCTAERGCGQQIPGLINNAKYKGPGELNEIINPNYMGEWHPPEIENPLYYEEQHPLRIENVISGVILEFWSGSPNMLISNIYVGKNVTEAQIIGNKTWLMRDRAFRGSDGPTERKFMNSRLGNLQTTFHNERESPNPFDRIIDRILEQPLKFVLTAAVVLLTTSVLCCVVFT

SEQ ID NO: 751 - DNA, 1929 bp, Saccharomyces cerevisiae
  source 1..1929: mol_type = other DNA
atgtcaaaagctgtcggtattgatttaggtacaacatactcgtgtgttgctcactttgctaatgatcgtgtggacattattgccaacgatcaaggtaacagaaccactccatcttttgtcgctttcactgacactgaaagattgattggtgatgctgctaagaatcaagctgctatgaatccttcgaataccgttttcgacgctaagcgtttgatcggtagaaacttcaacgacccagaagtgcaggctgacatgaagcacttcccattcaagttgatcgatgttgacggtaagcctcaaattcaagttgaatttaagggtgaaaccaagaactttaccccagaacaaatctcctccatggtcttgggtaagatgaaggaaactgccgaatcttacttgggagccaaggtcaatgacgctgtcgtcactgtcccagcttacttcaacgattctcaaagacaagctaccaaggatgctggtaccattgctggtttgaatgtcttgcgtattattaacgaacctaccgccgctgccattgcttacggtttggacaagaagggtaaggaagaacacgtcttgattttcgacttgggtggtggtactttcgatgtctctttgttgtccattgaagacggtatctttgaagttaaggccaccgctggtgacacccatttgggtggtgaagattttgacaacagattggtcaaccacttcatccaagaattcaagagaaagaacaagaaggacttgtctaccaaccaaagagctttgagaagattaagaaccgcttgtgaaagagccaagagaactttgtcttcctccgctcaaacttccgttgaaattgactctttgttcgaaggtatcgatttctacacttccatcaccagagccagattcgaagaattgtgtgctgacttgttcagatctactttggacccagttgaaaaggtcttgagagatgctaaattggacaaatctcaagtcgatgaaattgtcttggtcggtggttctaccagaattccaaaggtccaaaaattggtcactgactacttcaacggtaaggaaccaaacagatctatcaacccagatgaagctgttgcttacggtgctgctgttcaagctgctattttgactggtgacgaatcttccaagactcaagatctattgttgttggatgtcgctccattatccttgggtattgaaactgctggtggtgtcatgaccaagttgattccaagaaactctaccattccaacaaagaagtccgagatcttttccacttatgctgataaccaaccaggtgtcttgattcaagtctttgaaggtgaaagagccaagactaaggacaacaacttgttgggtaagttcgaattgagtggtattccaccagctccaagaggtgtcccacaaattgaagtcactttcgatgtcgactctaacggtattttgaatgtttccgccgtcgaaaagggtactggtaagtctaacaagatcactattaccaacgacaagggtagattgtccaaggaagatatcgaaaagatggttgctgaagccgaaaaattcaaggaagaagatgaaaaggaatctcaaagaattgcttccaagaaccaattggaatccattgcttactctttgaagaacaccatttctgaagctggtgacaaattggaacaagctgacaaggacaccgtcaccaagaaggctgaagagactatttcttggttagacagcaacaccactgccagcaaggaagaattcgatgacaagttgaaggagttgcaagacattgccaacccaatcatgtctaagttgtaccaagctggtggtgctccaggtggcgctgcaggtggtgctccaggcggtttcccaggtggtgctcctccagctccagaggctgaaggtccaaccgttgaagaagttgattaa

SEQ ID NO: 752 - protein, 642 aa, Saccharomyces cerevisiae [sequence omitted]

SEQ ID NO: 753 - DNA, 1116 bp, Saccharomyces cerevisiae
  source 1..1116: mol_type = other DNA
atgactagacctaaaactttttttgatatttctattggaggtaaaccccaaggccgtatagtttttgagttgtacaatgacatagtgcctaaaacggctgaaaattttttgaagttgtgtgaaggaaatgctggtatggcaaagactaaacctgatgtaccattgtcgtacaagggttccattttccacagagtgatcaaagacttcatgtgtcaatttggtgattttaccaattttaatggtactggcggtgagagcatatacgatgaaaaattcgaggatgaaaatttcactgttaaacatgataaaccattccttctatccatggccaacgccggtccaaataccaatggatctcaagctttcataacctgtgttcctacacctcatttggacgggaagcacgttgtgtttggtgaagtgattcaaggtaaaagaattgttcgtttgattgaaaaccaacaatgtgaccaagaaaacaacaagccattgcgtgatgtaaagattgatgactgtggcgtgttacctgacgattatcaagtgccagagaatgccgaagctacaccaacagatgagtacggcgataattatgaagatgttttaaaacaagacgaaaaagttgacttgaagaatttcgacaccgtcttgaaagctatcgaaacggtaaagaacattggtactgaacagttcaagaaacagaactattccgtggctttagaaaaatatgtcaaatgtgataaattcttgaaagagtatttcccagaagatttggagaaggaacaaattgaaaaaatcaatcaattgaaagtgtctattccattgaatattgccatctgtgctcttaaattaaaagattacaagcaagtattagtagcctcatcggaggtgttatatgccgaagcggctgacgaaaaagccaaggccaaagctttgtaccgtcgtggcctggcctattaccatgttaatgacacagatatggctctcaatgacctagaaatggccactactttccagccaaatgacgctgccattttgaaagctattcataatactaaattaaaaagaaagcaacaaaacgaaaaagctaaaaagtctctttcgaagatgttctcctga

SEQ ID NO: 754 - protein, 371 aa, Saccharomyces cerevisiae
MTRPKTFFDISIGGKPQGRIVFELYNDIVPKTAENFLKLCEGNAGMAKTKPDVPLSYKGSIFHRVIKDFMCQFGDFTNFNGTGGESIYDEKFEDENFTVKHDKPFLLSMANAGPNTNGSQAFITCVPTPHLDGKHVVFGEVIQGKRIVRLIENQQCDQENNKPLRDVKIDDCGVLPDDYQVPENAEATPTDEYGDNYEDVLKQDEKVDLKNFDTVLKAIETVKNIGTEQFKKQNYSVALEKYVKCDKFLKEYFPEDLEKEQIEKINQLKVSIPLNIAICALKLKDYKQVLVASSEVLYAEAADEKAKAKALYRRGLAYYHVNDTDMALNDLEMATTFQPNDAAILKAIHNTKLKRKQQNEKAKKSLSKMFS

SEQ ID NO: 755 - DNA, 873 bp, Saccharomyces cerevisiae
  source 1..873: mol_type = other DNA
atggaaaagctattacagtggtctattgcgaattctcaaggggacaaagaagctatggctagggccggccaacctgatcctaaattgctacagcagttattcggtggtggtggtcctgacgatccaaccttaatgaaagaatccatggctgttattatgaatccggaggttgacttagaaacaaaactcgttgcatttgacaactttgaaatgttgattgagaacttagataatgctaataatatcgaaaatttaaaactgtgggagccattgttggatgttcttgttcagacgaaggatgaagaactacgtgctgctgctttatccattattggaacggctgtgcaaaacaacttggattcgcaaaataatttcatgaaatacgacaatggtctgcgaagccttatcgaaatagctagtgacaagacaaagccactcgacgtgagaacaaaagctttttacgcactatctaatctaataagaaaccacaaagatatctcagaaaagtttttcaaattaaatgggctcgactgcatagcacctgtattaagtgataacaccgccaaaccaaaactgaaaatgagagccattgccttattgaccgcatatttgtcatctgttaagattgatgaaaatataatcagtgtgctgagaaaggatggagtaattgaaagtacgattgagtgcttgtctgacgagagtaacttgaacatcatagatagagttctgtcttttctctctcacctgatatcttccggaataaaatttaatgaacaggaattgcacaaattgaacgaaggttacaaacatatcgagcctctaaaggacagacttaatgaagacgattatttagccgtaaagtatgtattatga

SEQ ID NO: 756 - protein, 290 aa, Saccharomyces cerevisiae
MEKLLQWSIANSQGDKEAMARAGQPDPKLLQQLFGGGGPDDPTLMKESMAVIMNPEVDLETKLVAFDNFEMLIENLDNANNIENLKLWEPLLDVLVQTKDEELRAAALSIIGTAVQNNLDSQNNFMKYDNGLRSLIEIASDKTKPLDVRTKAFYALSNLIRNHKDISEKFFKLNGLDCIAPVLSDNTAKPKLKMRAIALLTAYLSSVKIDENIISVLRKDGVIESTIECLSDESNLNIIDRVLSFLSHLISSGIKFNEQELHKLNEGYKHIEPLKDRLNEDDYLAVKYVL

SEQ ID NO: 757 - DNA, 2727 bp, Saccharomyces cerevisiae
  source 1..2727: mol_type = other DNA
atgaacgaccaaacgcaatttacagaaagggctctaacgattttgacgttggctcaaaaattggcttcggatcatcaacatccacaattacaacctatacatattctagctgccttcattgaaacgccagaagatggatcagtcccttacctacagaatctaattgagaagggccgttacgactatgatcttttcaagaaagtggttaatagaaatctagtaagaattcctcaacagcaacctgcacctgcggagataactccaagttatgctttggggaaagtccttcaagacgctgctaagattcaaaaacaacagaaggactcatttatagcgcaagaccatatattgtttgctctattcaatgattcgtctattcagcaaatatttaaggaagctcaagtagatattgaggccatcaagcaacaagctcttgaacttcgtggtaacactagaattgactctcgtggcgctgatacgaacacacctttggaatatttatcaaagtacgccattgatatgactgagcaggctcgtcaaggtaaacttgaccctgtcatcggccgtgaagaagaaataagaagcactattagagttttagcaagaagaattaagtccaacccatgtttaattggtgagccaggtatcggtaagaccgctattattgaaggtgttgctcaaagaatcattgacgatgacgttcccactatcttacaaggcgctaaattgttcagtctagatttggccgcattaaccgcaggtgctaaatacaaaggtgatttcgaagaaagattcaaaggtgttttgaaggaaatcgaagaatcaaagactctaattgtgttattcattgatgaaattcacatgttaatgggtaatggtaaggacgacgctgctaacatcttgaagccagctttgtccagaggccaattgaaggtcatcggtgccaccaccaataacgaatatagatctattgtggaaaaggatggtgcctttgaaagaagattccagaaaattgaagtcgctgaaccaagtgtgagacaaacagtggccatattgagaggtctgcaaccaaagtatgaaatacatcatggtgtaaggattctggatagcgccttagtcactgctgctcaattagccaagcgttacttgccatatagaagattgccagattctgctttggatttagttgatatttcttgtgctggtgtcgccgtcgcaagagattctaagccagaagaattggattccaaggaacgtcaattgcaattgattcaagtagagataaaagctctagagagagatgaagatgccgactccaccactaaagatagattaaagttagctaggcagaaggaagcttcattgcaagaagaattggaacctctaagacaacgttacaatgaagaaaagcatggccatgaagaattgacacaagctaaaaagaaattggatgaactggaaaacaaggcccttgatgctgaacgtagatatgatactgctaccgccgctgatttaaggtacttcgccatcccagatatcaaaaagcaaatcgaaaagcttgaagatcaggttgctgaggaagagagacgtgctggtgccaactccatgatccaaaatgtggtcgattcagacaccatttctgaaacagctgcaagattgactggtatccctgttaagaagttgtcagaatctgaaaatgaaaaattgattcatatggaacgtgacttatcatctgaagtcgtgggccaaatggatgccattaaagctgtttccaatgccgttagattgtctagatcaggtttagctaatccaaggcaaccagcatccttcttatttttaggtttgtccggttccggtaaaactgaattggctaaaaaagttgctggatttttgtttaatgatgaggacatgatgatcagggtcgattgttctgaattaagcgagaagtatgcggtctctaagttgttgggtaccacggcaggttatgtcgggtacgatgaaggtggctttttaactaaccaactgcaatacaaaccatactccgttttgttattcgatgaagtagaaaaggcacatcctgatgttttgactgtcatgctacaaatgttggatgacggtagaattacttctggtcaaggtaagacgatcgactgttccaattgtattgtcatcatgacttccaatctaggtgctgaatttatcaattctcaacaaggatcaaagatccaagaatctaccaagaatttggtcatgggtgctgttaggcaacatttcagaccagaatttttgaacagaatttctagtatagtcattttcaacaagctatctagaaaagctattcataagatcgtggatattcgtttgaaggaaattgaagagagattcgagcaaaatgataaacattacaagttgaatttaactcaagaggccaaggacttcttggccaaatatggttattccgatgatatgggtgcacgtccactgaacaggttaattcaaaacgaaattttgaacaaactggcactaaggatcttaaagaatgaaatcaaggataaggaaactgtcaatgtcgtcttgaagaagggtaaatctcgtgatgaaaatgttcctgaggaagctgaagaatgtctggaagttctaccaaatcacgaagctactataggggctgacacgttaggtgatgacgataatgaggacagtatggaaattgatgatgacctagattaa

SEQ ID NO: 758 - protein, 908 aa, Saccharomyces cerevisiae
MNDQTQFTERALTILTLAQKLASDHQHPQLQPIHILAAFIETPEDGSVPYLQNLIEKGRYDYDLFKKVVNRNLVRIPQQQPAPAEITPSYALGKVLQDAAKIQKQQKDSFIAQDHILFALFNDSSIQQIFKEAQVDIEAIKQQALELRGNTRIDSRGADTNTPLEYLSKYAIDMTEQARQGKLDPVIGREEEIRSTIRVLARRIKSNPCLIGEPGIGKTAIIEGVAQRIIDDDVPTILQGAKLFSLDLAALTAGAKYKGDFEERFKGVLKEIEESKTLIVLFIDEIHMLMGNGKDDAANILKPALSRGQLKVIGATTNNEYRSIVEKDGAFERRFQKIEVAEPSVRQTVAILRGLQPKYEIHHGVRILDSALVTAAQLAKRYLPYRRLPDSALDLVDISCAGVAVARDSKPEELDSKERQLQLIQVEIKALERDEDADSTTKDRLKLARQKEASLQEELEPLRQRYNEEKHGHEELTQAKKKLDELENKALDAERRYDTATAADLRYFAIPDIKKQIEKLEDQVAEEERRAGANSMIQNVVDSDTISETAARLTGIPVKKLSESENEKLIHMERDLSSEVVGQMDAIKAVSNAVRLSRSGLANPRQPASFLFLGLSGSGKTELAKKVAGFLFNDEDMMIRVDCSELSEKYAVSKLLGTTAGYVGYDEGGFLTNQLQYKPYSVLLFDEVEKAHPDVLTVMLQMLDDGRITSGQGKTIDCSNCIVIMTSNLGAEFINSQQGSKIQESTKNLVMGAVRQHFRPEFLNRISSIVIFNKLSRKAIHKIVDIRLKEIEERFEQNDKHYKLNLTQEAKDFLAKYGYSDDMGARPLNRLIQNEILNKLALRILKNEIKDKETVNVVLKKGKSRDENVPEEAEECLEVLPNHEATIGADTLGDDDNEDSMEIDDDLD

SEQ ID NO: 759 - DNA, 1770 bp, Saccharomyces cerevisiae
  source 1..1770: mol_type = other DNA
atgtcattgacagccgatgaatacaaacaacaaggtaacgctgcatttaccgctaaggattacgataaagcgatagagctcttcactaaagctattgaagtttctgaaactccaaaccatgttttatattctaacaggtccgcctgttatacttctttaaagaaatttagtgacgcattgaatgatgctaatgaatgtgtcaaaatcaatccatcttggtctaagggttataatagactcggtgccgcccacttaggtcttggcgatctcgacgaagctgaaagcaactacaaaaaagccttggagttggatgccagtaacaaggccgccaaagaaggattggatcaggttcatcgtacccaacaggcaagacaggcacagcctgatttagggttgacacagttgtttgctgacccaaatttaattgaaaatttaaagaagaacccaaaaactagcgaaatgatgaaggaccctcaattagtggctaaactgattgggtacaaacaaaatccgcaagctattggccaagatctgtttactgatccaagattaatgaccatcatggctacattgatgggggttgatttaaacatggatgatataaaccaatcaaactccatgccaaaggaaccggaaaccagtaaaagcactgaacaaaagaaagatgctgaaccacaaagcgattccactacgagcaaggaaaattcctctaaagcaccacagaaagaagaaagtaaggaatccgagccaatggaagttgatgaagatgactctaaaattgaggccgacaaggaaaaggccgaaggtaacaagttttacaaggcacgtcaattcgatgaagctatagagcactacaacaaggcgtgggaactgcataaagatattacctatttaaacaaccgtgctgctgctgaatacgaaaaaggcgaatacgagacagctatttctaccttgaatgatgctgttgagcaaggtagagaaatgagagcggattacaaggtcatttccaaatcatttgcgcgtattggtaatgcctatcacaaattgggtgacttgaagaaaactatagaatactaccaaaaatcattgaccgaacatcgtactgctgacattttgaccaagttaaggaatgctgaaaaagaattgaagaaagctgaggcggaggcgtatgttaaccctgaaaaggcggaggaagcccgtcttgaaggtaaggaatattttaccaagagtgattggccgaatgctgttaaggcttacactgaaatgatcaaaagggcacctgaagatgctagaggatattctaatagagctgctgcactagcgaagttaatgtctttccctgaagctatcgcagattgtaacaaagccattgaaaaagatccaaatttcgtgagagcttatatcagaaaggccaccgcacaaattgctgttaaagaatatgcttccgctttggaaacactagatgcggccagaaccaaagatgctgaagtgaataatggttctagtgcaagggaaattgatcaactgtactacaaggcaagccaacaaagattccaacctggtaccagtaacgaaaccccagaagaaacctatcaaagggccatgaaagatcctgaagtggctgcgatcatgcaagatcctgttatgcaaagtattttgcagcaggcccaacagaatcccgctgctttacaagaacacatgaaaaatccagaagtattcaaaaagattcagacgttgatcgctgctggtatcatccggactggccgctaa

SEQ ID NO: 760 - protein, 589 aa, Saccharomyces cerevisiae
MSLTADEYKQQGNAAFTAKDYDKAIELFTKAIEVSETPNHVLYSNRSACYTSLKKFSDALNDANECVKINPSWSKGYNRLGAAHLGLGDLDEAESNYKKALELDASNKAAKEGLDQVHRTQQARQAQPDLGLTQLFADPNLIENLKKNPKTSEMMKDPQLVAKLIGYKQNPQAIGQDLFTDPRLMTIMATLMGVDLNMDDINQSNSMPKEPETSKSTEQKKDAEPQSDSTTSKENSSKAPQKEESKESEPMEVDEDDSKIEADKEKAEGNKFYKARQFDEAIEHYNKAWELHKDITYLNNRAAAEYEKGEYETAISTLNDAVEQGREMRADYKVISKSFARIGNAYHKLGDLKKTIEYYQKSLTEHRTADILTKLRNAEKELKKAEAEAYVNPEKAEEARLEGKEYFTKSDWPNAVKAYTEMIKRAPEDARGYSNRAAALAKLMSFPEAIADCNKAIEKDPNFVRAYIRKATAQIAVKEYASALETLDAARTKDAEVNNGSSAREIDQLYYKASQQRFQPGTSNETPEETYQRAMKDPEVAAIMQDPVMQSILQQAQQNPAALQEHMKNPEVFKKIQTLIAAGIIRTGR

SEQ ID NO: 761 - DNA, 459 bp, Saccharomyces cerevisiae
  source 1..459: mol_type = other DNA
atgtccttcattaaaaacttgttatttggaggtgttaaaacaagtgaggatccaaccgggctcacaggtaacggggcctcaaacacaaacgattctaataaaggtagtgaaccggtagtagcgggtaatttctttcctaggacgctttccaaatttaacggccacgacgatgaaaaaatatttattgctattaggggcaaagtatacgactgcacaagagggaggcagttttacggtccaagcgggccatacactaactttgcaggccatgatgcgtcgcgtggtcttgcattgaactccttcgatctggacgttattaaagattgggatcagcctatcgatcccttagatgatctgacaaaagaacagattgacgcactggatgagtggcaagagcattttgagaataagtacccatgcattggtactctgattccggagcctggcgtgaacgtatga

SEQ ID NO: 762 - protein, 152 aa, Saccharomyces cerevisiae
MSFIKNLLFGGVKTSEDPTGLTGNGASNTNDSNKGSEPVVAGNFFPRTLSKFNGHDDEKIFIAIRGKVYDCTRGRQFYGPSGPYTNFAGHDASRGLALNSFDLDVIKDWDQPIDPLDDLTKEQIDALDEWQEHFENKYPCIGTLIPEPGVNV

SEQ ID NO: 763 - DNA, 969 bp, Saccharomyces cerevisiae
  source 1..969: mol_type = other DNA
atggaaatgactgattttgaactaactagtaattcgcaatcgaacttggctatccctaccaacttcaagtcgactctgcctccaaggaaaagagccaagacaaaagaggaaaaggaacagcgaaggatcgagcgtattttgagaaacagaagagctgctcaccagagcagagagaaaaaaagactacatctgcagtatctcgagagaaaatgttctcttttggaaaatttactgaacagcgtcaaccttgaaaaactggctgaccacgaagacgcgttgacttgcagccacgacgcttttgttgcttctcttgacgagtacagggatttccagagcacgaggggcgcttcactggacaccagggccagttcgcactcgtcgtctgatacgttcacaccttcacctctgaactgtacaatggagcctgcgactttgtcgcccaagagtatgcgcgattccgcgtcggaccaagagacttcatgggagctgcagatgtttaagacggaaaatgtaccagagtcgacgacgctacctgccgtagacaacaacaatttgtttgatgcggtggcctcgccgttggcagacccactctgcgacgatatagcgggaaacagtctaccctttgacaattcaattgatcttgacaattggcgtaatccagccgtgattacgatgaccaggaaactacagtgaacaagaacactagccccagcttttgctttctgctttttttctttttttttttttttagtcgtggttctctgatgggggaggagccggttaaagtaccttcaaaagcagaatgcagggttattggaagctttctttttttcttttatgctagtttttcctgaacaaatagagccattcttttcttattactaagaaatggacggcttgcttgtactgtccgaagcgcagtcaggtttgaattcatttgaattgaatgatttcttcatcacttcatga

SEQ ID NO: 764 - protein, 319 aa, Saccharomyces cerevisiae
MEMTDFELTSNSQSNLAIPTNFKSTLPPRKRAKTKEEKEQRRIERILRNRRAAHQSREKKRLHLQYLERKCSLLENLLNSVNLEKLADHEDALTCSHDAFVASLDEYRDFQSTRGASLDTRASSHSSSDTFTPSPLNCTMEPATLSPKSMRDSASDQETSWELQMFKTENVPESTTLPAVDNNNLFDAVASPLADPLCDDIAGNSLPFDNSIDLDNWRNPAVITMTRKLQTRTLAPAFAFCFFSFFFFLVVVLWGRSRLKYLQKQNAGLLEAFFFSFMLVFPEQIEPFFSYYEMDGLLVLSEAQSGLNSFELNDFFITS

SEQ ID NO: 765 - DNA, 1518 bp, Saccharomyces cerevisiae; identical to SEQ ID NO: 700
  source 1..1518: mol_type = other DNA

SEQ ID NO: 766 - protein, 505 aa, Saccharomyces cerevisiae; identical to SEQ ID NO: 699

SEQ ID NO: 767 - DNA, 1470 bp, Saccharomyces cerevisiae
  source 1..1470: mol_type = other DNA
atgtctgctgatttcggtttgattggtttggccgtcatgggtcaaaatttgatcttgaacgctgctgaccacggtttcactgtttgtgcttacaacagaactcaatccaaggtcgaccatttcttggccaatgaagctaagggcaaatctatcatcggtgctacttccattgaagatttcatctccaaattgaagagacctagaaaggtcatgcttttggttaaagctggtgctccagttgacgctttgatcaaccaaatcgtcccacttttggaaaagggtgatattatcatcgatggtggtaactctcacttcccagattctaatagacgttacgaagaattgaagaagaagggtattcttttcgttggttctggtgtctccggtggtgaggaaggtgcccgttacggtccatctttgatgccaggtggttctgaagaagcttggccacatattaagaacatcttccaatccatctctgctaaatccgacggtgaaccatgttgcgaatgggttggcccagccggtgctggtcactacgtcaagatggttcacaacggtattgaatacggtgatatgcaattgatttgtgaagcttatgacatcatgaagagattgggtgggtttaccgataaggaaatcagtgacgtttttgccaaatggaacaatggtgtcttggattccttcttggtcgaaattaccagagatattttgaaattcgacgacgtcgacggtaagccattagttgaaaaaatcatggatactgctggtcaaaagggtactggtaagtggactgccatcaacgccttggatttgggtatgccagttactttgattggtgaagctgtctttgcccgttgtctatctgctttgaagaacgagagaattagagcctccaaggtcttaccaggcccagaagttccaaaagacgccgtcaaggacagagaacaatttgtcgatgatttggaacaagctttgtatgcttccaagattatttcttacgctcaaggtttcatgttgatccgtgaagctgctgctacttatggctggaaactaaacaaccctgccatcgctttgatgtggagaggtggttgtatcattagatctgttttcttgggtcaaatcacaaaggcctacagagaagaaccagatttggaaaacttgttgttcaacaagttcttcgctgatgccgtcaccaaggctcaatctggttggagaaagtcaattgcgttggctaccacctacggtatcccaacaccagccttttccaccgctttgtctttctacgatgggtacagatctgaaagattgccagccaacttactacaagctcaacgtgactactttggtgctcacactttcagagtgttgccagaatgtgcttctgacaacttgccagtagacaaggatatccatatcaactggactggccacggtggtaatgtttcttcctctacataccaagcttaa

SEQ ID NO: 768 - protein, 489 aa, Saccharomyces cerevisiae
MSADFGLIGLAVMGQNLILNAADHGFTVCAYNRTQSKVDHFLANEAKGKSIIGATSIEDFISKLKRPRKVMLLVKAGAPVDALINQIVPLLEKGDIIIDGGNSHFPDSNRRYEELKKKGILFVGSGVSGGEEGARYGPSLMPGGSEEAWPHIKNIFQSISAKSDGEPCCEWVGPAGAGHYVKMVHNGIEYGDMQLICEAYDIMKRLGGFTDKEISDVFAKWNNGVLDSFLVEITRDILKFDDVDGKPLVEKIMDTAGQKGTGKWTAINALDLGMPVTLIGEAVFARCLSALKNERIRASKVLPGPEVPKDAVKDREQFVDDLEQALYASKIISYAQGFMLIREAAATYGWKLNNPAIALMWRGGCIIRSVFLGQITKAYREEPDLENLLFNKFFADAVTKAQSGWRKSIALATTYGIPTPAFSTALSFYDGYRSERLPANLLQAQRDYFGAHTFRVLPECASDNLPVDKDIHINWTGHGGNVSSSTYQA

SEQ ID NO: 769 - DNA, 1161 bp, Saccharomyces cerevisiae
  source 1..1161: mol_type = other DNA
atgtccgccgctactgttggtaaacctattaagtgcattgctgctgttgcgtatgatgcgaagaaaccattaagtgttgaagaaatcacggtagacgccccaaaagcgcacgaagtacgtatcaaaattgaatatactgctgtatgccacactgatgcgtacactttatcaggctctgatccagaaggacttttcccttgcgttctgggccacgaaggagccggtatcgtagaatctgtaggcgatgatgtcataacagttaagcctggtgatcatgttattgctttgtacactgctgagtgtggcaaatgtaagttctgtacttccggtaaaaccaacttatgtggtgctgttagagctactcaagggaaaggtgtaatgcctgatgggaccacaagatttcataatgcgaaaggtgaagatatataccatttcatgggttgctctactttttccgaatatactgtggtggcagatgtctctgtggttgccatcgatccaaaagctcccttggatgctgcctgtttactgggttgtggtgttactactggttttggggcggctcttaagacagctaatgtgcaaaaaggcgataccgttgcagtatttggctgcgggactgtaggactctccgttatccaaggtgcaaagttaaggggcgcttccaagatcattgccattgacattaacaataagaaaaaacaatattgttctcaatttggtgccacggattttgttaatcccaaggaagatttggccaaagatcaaactatcgttgaaaagttaattgaaatgactgatgggggtctggattttacttttgactgtactggtaataccaaaattatgagagatgctttggaagcctgtcataaaggttggggtcaatctattatcattggtgtggctgccgctggtgaagaaatttctacaaggccgttccagctggtcactggtagagtgtggaaaggctctgcttttggtggcatcaaaggtagatctgaaatgggcggtttaattaaagactatcaaaaaggtgccttaaaagtcgaagaatttatcactcacaggagaccattcaaagaaatcaatcaagcctttgaagatttgcataacggtgattgcttaagaaccgtcttgaagtctgatgaaataaaatag

SEQ ID NO: 770 - protein, 386 aa, Saccharomyces cerevisiae
MSAATVGKPIKCIAAVAYDAKKPLSVEEITVDAPKAHEVRIKIEYTAVCHTDAYTLSGSDPEGLFPCVLGHEGAGIVESVGDDVITVKPGDHVIALYTAECGKCKFCTSGKTNLCGAVRATQGKGVMPDGTTRFHNAKGEDIYHFMGCSTFSEYTVVADVSVVAIDPKAPLDAACLLGCGVTTGFGAALKTANVQKGDTVAVFGCGTVGLSVIQGAKLRGASKIIAIDINNKKKQYCSQFGATDFVNPKEDLAKDQTIVEKLIEMTDGGLDFTFDCTGNTKIMRDALEACHKGWGQSIIIGVAAAGEEISTRPFQLVTGRVWKGSAFGGIKGRSEMGGLIKDYQKGALKVEEFITHRRPFKEINQAFEDLHNGDCLRTVLKSDEIK

SEQ ID NO: 771 - DNA, 1557 bp, Artificial
  source 1..1557: mol_type = other DNA
atgatcactactttgttgttgttctctttgttcgttttgatcactgctttgtacttcgttttgaagaagaagttccaatactgggaaaagagaaacgttccacacgttccaccagttccattgttgggtaacttcgctaagtacatcttgcaaaaggaattcatcggtcacactgctcaagaaatctgttctaagttcccaaacgaaccagttgttggtgcttactacgctactgaaccagctttgatggttcaagacccagaattgatcaagttggttgttactaaggacttctacttcttcaacggtcacgaaatctctgaattcaaccacagagaaagattgggtaagaacttgttcgcttcttacggtgacaagtggaaggttttgagacaaaacttgactccaatcttcacttcttctaagatgaagaacatgttccacttgatcgaaaagtgttctcacgacttcgaagacttgttggacaaggaagctagaaaggacaaggaagttgaaatgagatctttgatcgctagattcactatggacggtatcggtaactgtgctttcggtatccacactcacactatggaacaatctgaaaacaacccattcactactatcggtaacgctttcttcttccacaactggtacagatctttccaattgatcttgagaactatctacccatctatcttctacggtttgggttacaagttcatcccaactgaagctgaagacttcttcactaacatgttgactgaaatcttcaaggctagagactacactccaactaacagaaacgacttcgttgacttgatgttgaagttcaagactaagaagactatggttggtgactctttgcaaaacatcaagactgacgacagaaagaaggttgaattgcaagttgacgacgacttgttgatcgctcaatgtgttttgttcttcactgctggtttcgaaacttctgctactactttgtctttcactttgtacgaattggctaagcacccagaagctcaaaagagagctatcgctgaagttgacgactacttgcaaagacacaacaacgaattgaagtacgaatgtttgtctgaaatgccattcatcgaagcttgtttcgacgaaactttgagaatgtacccagctgctggtttgttgttgagagaagttatccaagactacactttcccatctggtttgaaggttgaaaagggtttgagagttttcgttccattgtaccacttgcaccacaacccagctttcttcccagacccagaagaatacagaccagaaagattcttgccagaaaacaagcacaacatcagaccatacacttacatgccattcggtgacggtccaagaatctgtatcggtatgagattcgctaagatgcaaatgactgctggtatcatcactgttttgaagaagtacagattggaattggctccaggtatgaagactaaggttgaattcactccaaactctatcatcactcaagttaagggtggtatcaagttgaacatgatcgaaagagaaggttgggaacaaagataa

SEQ ID NO: 772 - protein, 518 aa, Artificial
MITTLLLFSLFVLITALYFVLKKKFQYWEKRNVPHVPPVPLLGNFAKYILQKEFIGHTAQEICSKFPNEPVVGAYYATEPALMVQDPELIKLVVTKDFYFFNGHEISEFNHRERLGKNLFASYGDKWKVLRQNLTPIFTSSKMKNMFHLIEKCSHDFEDLLDKEARKDKEVEMRSLIARFTMDGIGNCAFGIHTHTMEQSENNPFTTIGNAFFFHNWYRSFQLILRTIYPSIFYGLGYKFIPTEAEDFFTNMLTEIFKARDYTPTNRNDFVDLMLKFKTKKTMVGDSLQNIKTDDRKKVELQVDDDLLIAQCVLFFTAGFETSATTLSFTLYELAKHPEAQKRAIAEVDDYLQRHNNELKYECLSEMPFIEACFDETLRMYPAAGLLLREVIQDYTFPSGLKVEKGLRVFVPLYHLHHNPAFFPDPEEYRPERFLPENKHNIRPYTYMPFGDGPRICIGMRFAKMQMTAGIITVLKKYRLELAPGMKTKVEFTPNSIITQVKGGIKLNMIEREGWEQR

SEQ ID NO: 773 - DNA, 1110 bp, Aquilegia coerulea
  source 1..1110: mol_type = other DNA
atggaaatcgaatcgcaagcgaacaaccacgaagaagaattcaacaagcaaaagacggtgcaaaagatcttcctaaagcgcatgatcctactaatgaactgcgcgattctatctattggtaatactggtggtcctctcctactacgcctatactttattagaggtggtaagagagtttggctatcttgttggctagaaactggtggttggcctattatgctaattcctttgctagggtcgtacatctacagagtgagaaagtctaaagaaaaggcgaagctactattcatcacgccttttctatttgttgccggtgccgttctaggtgttctaactggtgttgatgattacctatatgcgtacggtgtttctaagctacctgtttctacttcggcgctaattatttctacgcaactagtttttactgcgggtttcgcctttctactagtgaagcaaaagttcacgtcgtacactattaacgcgatcgttctactaactgttgccgccgttgttttgggtgttagagcctcttctgatagacctaacggtgaatctaagatggaatacttcactggtttctttatgacgctaggtgcctctgccttgtacggttttgttctacctatggtggaactcacttacaagaagtctaagacgaagatctcttacacgctagtgatcgaaatgcaaatggtgatgtctctatttgccactgccttctgtacgatcgggatgctaattaacaaggatttccaagcgattcctagagaagccaaagcctatgaactaggtgaagccaagtactacacggtgctagtttctaatgccatcgtttggcagttttttttcctaggtgccatcggtgttattttctcggcctcttctctactatcgggtattatgattgccgtgctactacctctaactgaatctctagccgttgttttctaccacgagaagttctcttctgaaaagggtattgccctagccctatctctatggggtttcgtttcttacttttacggtgagtacaagcagacgaagcaactacaacaatcgatcattgaatcgaagacgaatacggttgttaatgcctcttctcctacgtaa

SEQ ID NO: 774 - protein, 369 aa, Aquilegia coerulea; identical to SEQ ID NO: 537

SEQ ID NO: 775 - DNA, 1110 bp, Aquilegia coerulea
  source 1..1110: mol_type = other DNA
atggaaatagaatctcaggcaaacaatcacgaagaagagtttaacaagcaaaaaacggtccaaaagatatttcttaaacgtatgatcttacttatgaactgcgcgattctcagcatcggtaataccggaggcccgttactgctgagattgtattttattcgcggaggaaagcgagtatggttgtcttgttggctagagactggtggttggccaattatgttaataccacttttaggctcttatatatacagggtaaggaagtcaaaggaaaaggctaaactgctttttataacgcctttcttgtttgtcgctggcgctgtgcttggtgtcttaaccggggtagacgattatttatacgcttacggagtatctaaattgcctgtatcgacctccgctctgataatttcaacacagttggtgtttaccgcaggcttcgccttcctgttggttaaacagaaattcacgtcttatacaataaatgccatagttttgttaacagttgccgcagtcgtacttggcgtgagagcatcaagtgatagaccaaacggtgagagtaaaatggaatactttacaggttttttcatgaccttgggagcctctgcactctacgggtttgttttgcccatggtcgagctcacatataagaaatcaaaaacaaagatttcctataccctagttattgagatgcagatggttatgtctttatttgcgactgctttttgtactattggaatgttgattaacaaggatttccaagctattccaagagaagcaaaggcttacgaattgggggaagctaagtactacactgtgttagtttccaatgcaatcgtctggcaattcttctttctaggtgcaattggtgtgatctttagcgctagttccttgctaagtggtattatgattgccgttttattacccttgactgaatcgctagctgttgtattttatcatgagaagttttcgtcagaaaaaggtatcgccctagccttatctttatggggtttcgtttcctacttctatggtgaatataaacaaactaaacaattacaacaatcaatcatcgaatcaaaaactaatactgttgttaacgcgagttctcctacttaa

SEQ ID NO: 776 - protein, 369 aa, Aquilegia coerulea; identical to SEQ ID NO: 537

SEQ ID NO: 777 - DNA, 1110 bp, Aquilegia coerulea
  source 1..1110: mol_type = other DNA
atggagatagagagtcaggctaacaatcacgaggaagagttcaataagcagaaaacagttcagaaaatatttctgaaacgtatgatactgttaatgaattgtgctatcctgagcataggaaacacgggcggaccattgctactaagactgtatttcatccgtggcgggaaacgtgtgtggttaagctgctggcttgagacgggtgggtggcctatcatgctaatcccgcttttaggttcttatatttatagggtaaggaaaagcaaggagaaagctaaactactatttataactcctttcttattcgtcgcaggagccgtattaggagtgcttacaggggtcgacgactatttatacgcatatggagtctccaaactacccgtgtccacatcagctctaataatatcaacacagctagtcttcaccgctggatttgcattcctgcttgttaaacagaaattcacaagttatacaataaatgctattgtactgcttaccgtcgccgctgtcgtcttgggcgtaagggcaagctccgacaggcctaatggagagtccaaaatggagtattttacgggattcttcatgacgcttggagccagcgccctttatgggttcgtcttacctatggtggagttgacctataagaaatcaaagactaagatatcatatacactggtaatagagatgcagatggttatgagcttattcgcaaccgcattttgcactattggcatgttaatcaataaagactttcaggctatacctagggaagcaaaggcgtacgagctaggagaggcaaaatattatacagttttagtctccaacgcaattgtatggcaattcttctttctgggagctattggagtcatattttctgcatcaagcttactgtcaggaatcatgatcgccgttcttctacctctgaccgagtcattagcagtggtattttatcatgagaaattttcaagtgagaaaggcatcgccttagcactgtcgttatggggatttgtatcatatttctatggcgaatataaacaaacgaaacagctacagcagagtattatcgagtctaaaactaacacagtggtcaacgccagttcccctacttag

SEQ ID NO: 778 - protein, 369 aa, Aquilegia coerulea; identical to SEQ ID NO: 537

SEQ ID NO: 779 - DNA, 1062 bp, Momordica charantia
  source 1..1062: mol_type = other DNA
atggacaaagaacaacaacgcgatgccgccatgaagagagccctactaattttcaactgcgttctactagccattggtaattgtggtggtcctctagttatgcgcctatactttgttcatggtggtaagagagtttggctatcttcttggctagaaactggtggttggcctattatctttattcctctagcgatctcttacttccatagacgtagagccgccgccggtgaatctactactctaatttttatgaagccgcgcctattcctagccgccactgttattggtgttattacgggtttcgatgattacctatatgcctacggtgttgccagactacctgtttctacttcggccctaattattgcctgtcaactagccttcactgccgttttcgcctacctactagttaagcaaaagttcacgtcgtactcgattaacgccgttgttctaatgactattggtggtgccgttctagccctacatacttctggtgatagacctgcgggtgaatctactaaggcctatgttgccggtttcctaatgactgttgccgccgccctactatacggttttgttctacctctagttgagctaacttacaagaaggcgaagcaacaaattacgtacacgctagttctagaaatccagctagtgatgtctctatttgccactctagtctgtacggtggggatgctaattaacaacgatttccaagttattccgcgcgaagccagagaatttggtctaggtgaaactaagtactacgttgtgctagccttttcggcgattatttggcaaggttttttcctaggtgccatcggtgttattttctgctcttcttctctattctcgggtatcgttattgccgttctactacctgttacggaaattctagccgtggttatcttctcggaaaagttccaagccgaaaagggtgtttctctagccctaaatctatggggtttcgtgtcttacttttacggtgaaatcaagcacgacaagaagagaaagctagaactacaaaatgccgaatcggcgtgccaaattacttctgtttaa

SEQ ID NO: 780 - protein, 353 aa, Momordica charantia; identical to SEQ ID NO: 595

SEQ ID NO: 781 - DNA, 1062 bp, Momordica charantia
  source 1..1062: mol_type = other DNA
atggacaaagagcaacagagagatgccgctatgaaacgtgcactattgatttttaattgcgtgctgctggccataggtaactgcggtgggcccctcgtaatgcgcctttactttgtccatggtggtaagcgcgtatggcttagttcatggctcgaaaccggtggctggccgatcatctttatcccactagctatttcttattttcataggcggcgagctgccgcaggcgaatcaacgaccttgatttttatgaagcctagactctttcttgcagcaaccgttataggcgtgatcactgggttcgacgattatctgtacgcctatggtgttgcgagactgccagtctccacgtctgctctgatcatcgcctgtcagcttgcttttactgccgtctttgcctatttgctagtcaagcagaagtttacttcttactccataaatgcggtcgtcctaatgaccattggaggagccgtgctagccttgcatacatctggagataggcctgcgggtgagagtacgaaggcatatgtagcgggttttcttatgacagtggctgcagcattgttgtatggttttgtattaccattagtagagttaacatacaaaaaggcaaaacagcaaataacatacactttggtcttagagatccaacttgtgatgagtttgttcgcaacattggtctgtactgtgggcatgttaattaataacgattttcaagttataccaagagaagcaagggaattcggtttaggcgaaacaaaatattacgttgtattagctttctctgctataatatggcaaggattttttttaggtgctattggtgtaattttctgttcgtcaagcttattttctggtattgtcatagcagttttattgcctgtgactgaaattttagctgttgttattttttcagaaaaattccaagctgaaaaaggggttagcttggctttgaatttatggggattcgtttcgtacttctacggcgaaattaaacacgataaaaaaagaaaattggaattacaaaacgctgaatcagcttgtcagattacttccgtttaa

SEQ ID NO: 782 - protein, 353 aa, Momordica charantia; identical to SEQ ID NO: 595

SEQ ID NO: 783 - DNA, 1062 bp, Momordica charantia
  source 1..1062: mol_type = other DNA
atggacaaggagcagcagcgtgacgccgccatgaaacgtgcattactgatatttaattgtgtcttactagcaatcggaaactgcggcggacctcttgtcatgcgtctgtatttcgtccacggcggcaaaagggtctggctgtcttcctggcttgagacgggcggctggccgataatattcatacctctggctatttcctattttcacaggagacgtgcagccgcaggggagtcgaccacactaatcttcatgaaaccgcgtttattcttagccgcaacggtaataggcgtgataacgggctttgacgactatttatacgcatatggagtagcccgtttacctgtcagcacctcagccttaatcatcgcgtgccagcttgcctttacagccgtgtttgcatatctactggtgaaacagaaatttactagctattcaatcaatgcagtagtgctgatgacgatcggtggcgcagtacttgctctacacacgtctggagacaggcctgcaggagagtctaccaaagcctacgtcgcaggctttctgatgacggtggcggcggcactgctatatggattcgtattacctctggtagaactgacgtataagaaagcgaaacagcagataacttatacgttagtactagagattcaactggttatgtcacttttcgccaccctagtctgcactgtgggtatgttaatcaataatgactttcaggtaatacctcgtgaggcaagggagttcgggttaggcgagacaaaatattatgtggtacttgccttctctgctatcatatggcaggggttctttcttggagccataggagtgatcttttgttccagttcacttttcagcggcattgtgatcgctgtcttattacctgtcactgagatattagccgtggtaattttctcagagaaatttcaggcagagaaaggcgtatccctggcgcttaacctgtggggatttgttagttatttctatggcgagattaaacatgataagaaacgtaaattagagttacagaacgcggagtctgcgtgtcagatcacgagcgtgtag

SEQ ID NO: 784 - protein, 353 aa, Momordica charantia; identical to SEQ ID NO: 595

SEQ ID NO: 785 - DNA, 1062 bp, Momordica charantia
  source 1..1062: mol_type = other DNA
atggacaaggaacaacaaagagacgctgctatgaagagagctttgttgatcttcaactgtgttttgttggctatcggtaactgtggtggtccattggttatgagattgtacttcgttcacggtggtaagagagtttggttgtcttcttggttggaaactggtggttggccaatcatcttcatcccattggctatctcttacttccacagaagaagagctgctgctggtgaatctactactttgatcttcatgaagccaagattgttcttggctgctactgttatcggtgttatcactggtttcgacgactacttgtacgcttacggtgttgctagattgccagtttctacttctgctttgatcatcgcttgtcaattggctttcactgctgttttcgcttacttgttggttaagcaaaagttcacttcttactctatcaacgctgttgttttgatgactatcggtggtgctgttttggctttgcacacttctggtgacagaccagctggtgaatctactaaggcttacgttgctggtttcttgatgactgttgctgctgctttgttgtacggtttcgttttgccattggttgaattgacttacaagaaggctaagcaacaaatcacttacactttggttttggaaatccaattggttatgtctttgttcgctactttggtttgtactgttggtatgttgatcaacaacgacttccaagttatcccaagagaagctagagaattcggtttgggtgaaactaagtactacgttgttttggctttctctgctatcatctggcaaggtttcttcttgggtgctatcggtgttatcttctgttcttcttctttgttctctggtatcgttatcgctgttttgttgccagttactgaaatcttggctgttgttatcttctctgaaaagttccaagctgaaaagggtgtttctttggctttgaacttgtggggtttcgtttcttacttctacggtgaaatcaagcacgacaagaagagaaagttggaattgcaaaacgctgaatctgcttgtcaaatcacttctgtttaa

SEQ ID NO: 786 - protein, 353 aa, Momordica charantia; identical to SEQ ID NO: 595

SEQ ID NO: 787 - DNA, 1110 bp, Artemisia annua
  source 1..1110: mol_type = other DNA
atggacaaccataagtctgccactactacgactaatactgaacctatgactgccaaagtttctcctgccgccaaaaagacgctactaattctaaactgcatcctactatcggttggtatttgtggtggtcctctaattatgcgcctatactttgttcatggtggtaacagagtttggctctcgtcttttctagaaactgccggttggccttttatcgttcctgttctaatcgttctcttcttcatcagaagaaactctaacactaagacgacgactatctatatgcgccctagattgttcttcgccactgcctttgttggtatcctaactggtctagatgattacctatatgcctacggtctagccagactacctgtttctacttcgtctctaattatcgcctctcaactaggtttcactgccttctttgcctacctactagtgaagcaaaagttcacgccttactctattaacgcggttgttctactaactgttggtgccggtgttctagccctacatacttcttctgatagacctaagggtgagtctaagaaagagtacatgctaggtttcgttatgactgttggtgccgccctactatacggtttcattctacctctagttgagctaacttacaacaaggccaagcaagccattacgtacacgctagttctagaaatccaaatggttatgtgtctattcgcgacgattttctgtactgttggtatgatcgttaacaacgacttcaaggttattcctagagaagccactgaattcggtctaggtaagactaactactatacgattctatgtgcgtctgccctaacttggcaatgttttttcctaggtgccatcggtgttattttctgcgcctcttctctactatctggtatcattattgccgttgccctacctgttactgaagttctagccgttgttttcttctcggaaaagttccaagccgaaaaaggtgttgccctagttctatctctatggggttttgcctcttacttttacggtgagtacaagtctacgaaaaagcctaaggatatcaacgaatcgactagacaaactatggaactacctcaatcggattactcgagagtttag

SEQ ID NO: 788 - protein, 369 aa, Artemisia annua; identical to SEQ ID NO: 613

SEQ ID NO: 789 - DNA, 1110 bp, Artemisia annua
  source 1..1110: mol_type = other DNA
atggataatcataaatcagctacgaccactactaacacagaacccatgactgcgaaagtcagtcctgcagccaagaaaacgctcctcattctgaattgtatactgctatctgtagggatatgcggaggaccactaattatgcgattatactttgtacatgggggaaaccgtgtatggttgtcttcatttttggaaacagcaggctggccatttatcgtgccggtacttatagtgctcttttttattagacgtaacagtaacacgaaaacaaccaccatttacatgaggccaagattgttctttgccaccgccttcgtaggaattctaactggcctagacgattacctgtatgcgtatggccttgcccgcctacccgtgtcgacaagttctcttattatagcttctcaacttgggtttaccgcgttctttgcttatttattggtcaaacaaaaattcacgccttactccataaatgccgttgtcttattgaccgtcggtgctggagttctagcactgcacacttcttcggatagacctaagggcgaatctaaaaaagagtatatgttaggtttcgtaatgaccgtcggcgccgccttactttacggttttatacttccactggttgagttgacgtacaacaaagctaagcaggctatcacatacactttagtgttagagatacagatggtgatgtgcttatttgcaacaatcttttgtacagttggtatgatcgtcaataatgattttaaggtgatccctagagaggctacagaatttggtttgggtaagacaaattattatacaattttgtgcgcttctgcattaacttggcaatgttttttcttaggtgcaattggtgtcattttctgtgcttcctccttattgagcggtatcatcattgctgttgcattaccggttactgaagttttggctgttgtttttttcagtgaaaagttccaagcagaaaaaggtgttgctttagttttgagcttgtggggtttcgcaagctatttctatggtgaatataaatcaactaaaaagccaaaggatattaatgaatccactagacaaactatggaattgccacaatcagactattcaagggtttaa

SEQ ID NO: 790 - protein, 369 aa, Artemisia annua; identical to SEQ ID NO: 613

SEQ ID NO: 791 - DNA, 1110 bp, Artemisia annua
  source 1..1110: mol_type = other DNA
atggacaatcacaagtccgcaactaccacaaccaacaccgagcccatgaccgcaaaagtctctccggcggcgaaaaagaccctgttaatactgaattgcatcctactgagcgtaggaatttgcggtgggccactaataatgaggctgtacttcgtgcatggcggtaatcgtgtttggctgagttccttcttagaaaccgccggctggcccttcattgttccagtgctgatcgtgctattcttcatacgtcgtaactctaacacaaagacaactacgatttatatgagacctaggctgtttttcgcaactgctttcgtagggatccttacaggtctggacgattatttatacgcttacggtcttgctaggctgcccgttagcaccagtagcctaattatcgcaagccaattagggtttacagcattcttcgcctatttattggtgaaacaaaagtttactccctatagtatcaatgccgtcgtattgttaacggtgggggctggagtcttggcgcttcacacaagcagtgatcgtcccaaaggtgagagtaagaaagaatatatgttgggttttgttatgacggtaggtgccgcgctgctatatgggtttatcttgccgctagtggagcttacatacaacaaagctaagcaggcgataacgtacaccttagttcttgagatacagatggtaatgtgtttgtttgctacaatattctgtaccgtcggtatgatagtaaacaacgacttcaaggtaatccctcgtgaggcaaccgaatttggattaggcaaaactaattactacacaattctgtgtgcgtccgctttaacatggcagtgtttttttcttggagcgatcggagttattttttgcgcctcttccctgttaagcggtataatcatcgctgttgcgcttcccgtgacagaagtattagctgtggtgtttttttccgaaaaatttcaagcggaaaaaggagttgctttggtcctttccctatgggggttcgctagctacttctatggtgagtacaagagcaccaagaaacctaaggacataaacgaaagtacgaggcaaacaatggagcttccgcagtctgactatagcagagtttga

SEQ ID NO: 792 - protein, 369 aa, Artemisia annua; identical to SEQ ID NO: 613

SEQ ID NO: 793 - DNA, 1110 bp, Artemisia annua
  source 1..1110: mol_type = other DNA
atggacaaccacaagtctgctactactactactaacactgaaccaatgactgctaaggtttctccagctgctaagaagactttgttgatcttgaactgtatcttgttgtctgttggtatctgtggtggtccattgatcatgagattgtacttcgttcacggtggtaacagagtttggttgtcttctttcttggaaactgctggttggccattcatcgttccagttttgatcgttttgttcttcatcagaagaaactctaacactaagactactactatctacatgagaccaagattgttcttcgctactgctttcgttggtatcttgactggtttggacgactacttgtacgcttacggtttggctagattgccagtttctacttcttctttgatcatcgcttctcaattgggtttcactgctttcttcgcttacttgttggttaagcaaaagttcactccatactctatcaacgctgttgttttgttgactgttggtgctggtgttttggctttgcacacttcttctgacagaccaaagggtgaatctaagaaggaatacatgttgggtttcgttatgactgttggtgctgctttgttgtacggtttcatcttgccattggttgaattgacttacaacaaggctaagcaagctatcacttacactttggttttggaaatccaaatggttatgtgtttgttcgctactatcttctgtactgttggtatgatcgttaacaacgacttcaaggttatcccaagagaagctactgaattcggtttgggtaagactaactactacactatcttgtgtgcttctgctttgacttggcaatgtttcttcttgggtgctatcggtgttatcttctgtgcttcttctttgttgtctggtatcatcatcgctgttgctttgccagttactgaagttttggctgttgttttcttctctgaaaagttccaagctgaaaagggtgttgctttggttttgtctttgtggggtttcgcttcttacttctacggtgaatacaagtctactaagaagccaaaggacatcaacgaatctactagacaaactatggaattgccacaatctgactactctagagtttaa

SEQ ID NO: 794 - protein, 369 aa, Artemisia annua; identical to SEQ ID NO: 613

SEQ ID NO: 795 - protein, 453 aa, Heliothis virescens
MDTTGSINTDAIESIENEEEVIDDSEERELVTDSCSTKVLDAGEQPRDSYWIVYILFYLFGVTSLVPWNFLITANDYWMYKFRDVTPNNLTMVVRKTPFQAEFTSYLNVATAIPNLLFLILNSLYGHLVPLKARLQGSLVIVTICFLVTTTFVQINTDEWQNTFFIITIVSVVIMTAASAVFIGGLVGIASRFSKEYMAAVVSGQSLGGIIAAVAQIISLAFKISPLHSALIYFVIADIMVVTSLISYALLYKIDFFTYHILRGSGGIAANRHREVFMTVVIKKVWVYAFSIFAVFAISMAVYPAVTVLVESHPATAGTDWNNIFFVPVVNYLIFNCGDYAGRLVAGFLLRPTNQWIIAGASVLRVIGVPMLMLCNAQPRKHLPVVFMWDWEYIIIMIVFAFTNGYLTNIVMINSTRVVELHEREKASGLIATMLSVGLCAGAAVGMLLVHLL

SEQ ID NO: 796 - DNA, 1362 bp, Heliothis virescens
  source 1..1362: mol_type = other DNA
atggataccaccggttccattaacaccgatgctattgaatccatcgaaaacgaagaagaagttatcgacgactccgaagaaagagaattggttactgattcttgctccaccaaagttttggatgctggtgaacaacctagagattcttattggatcgtctacatcctgttctacttgttcggtgttacttctttggtcccatggaatttcttgattaccgctaatgattactggatgtacaagttcagagatgtcactccaaacaacttgaccatggttgttagaaagactccattccaagctgaattcacctcttacttgaatgttgctactgccattccaaacctgttgttcttgattctgaactccttgtacggtcatttggttccattgaaagctagattgcaaggttccttggttatcgttaccatctgtttcttggttactactaccttcgttcaaatcaacactgacgaatggcaaaacaccttcttcattatcaccatcgtttccgtcgttattatgactgctgcttctgctgtttttatcggtggtttggttggtattgcttccaggttctctaaagaatatatggctgctgttgtctccggtcaatctttaggtggtattattgctgcagttgcccaaattatctctttggcctttaagatctctccattgcattctgctttgatctacttcgttattgccgatattatggtcgtcacctccttgatttcttacgctttgttgtacaagatcgacttcttcacctaccatatcttgagaggttctggtggtatagctgctaatagacatagagaagttttcatgaccgtcgtcatcaaaaaggtttgggtttacgctttctccattttcgctgttttcgctatttctatggctgtttatccagctgttaccgttttggttgaatctcatccagctactgctggtactgattggaacaatattttcttcgttccagtcgtcaactacctgatttttaactgtggtgattacgccggtagattggttgctggttttttgttaagacctaccaaccagtggattatagctggtgcttctgttttgagagttatcggtgttccaatgttgatgttgtgtaatgctcagccaagaaaacacttgccagttgtttttatgtgggattgggagtacatcatcatcatgatcgttttcgctttcaccaacggttacttgactaacatcgttatgatcaactccaccagagttgttgaattgcacgaaagagaaaaagcctctggtttgattgctaccatgttgtctgttggtttgtgtgctggtgcagctgttggtatgttgttggttcatttgttgtaa

SEQ ID NO: 797 - protein, 457 aa, Chilo suppressalis
MDTTTGSINNEVNVDTVDNEEEIIDDSEERELVTDSCSTKVLDTAEQPRDRYNLVYILFYLFGITSLVPWNFLITANDYWMYKFRDVNPNNVTMFTEVRKSQFQAEFTSYLNVATAIPNLIFLILNSLYGHLVSMKSRLQGSLFIVTLAFLVTTALVQVDTDDWQNGFFIITMVTVVIMTAASAVFIGGLVGIASRFSKEYMAAVVSGQSLGGILAAVAQIISLAFKISPLHSALIYFVIADFMVISSLVSYAMLYKIDFFTHHILRGCGGMAVNRHREVTMKVILKKIWVYAFSIFAVFAVSMAVYPAVTVLVESHPVTKGTDWNNIYFVPVVNYLIFNCGDYSGRLVAGFILRPDNQWAIAGASILRIVGVPMLMLCNAQPRRHLPVLFLWDWEYILIMIVFAFTNGYLTNIVMINSTRVVELHEREKASSVIATMLSVGLTVGAAVGMLLVHFL

SEQ ID NO: 798 - DNA, 1374 bp, Chilo suppressalis
  source 1..1374: mol_type = other DNA
atggataccactaccggctccattaacaacgaagttaatgttgataccgtcgacaacgaagaagaaatcattgacgattccgaagaaagagaattggttaccgattcttgttccaccaaggttttggatactgctgaacaacctagagacagatacaacttggtttacatcctgttctacttgttcggtatcacttctttggtcccatggaatttcttgattaccgctaatgattactggatgtacaagttcagagatgtcaacccaaacaacgttactatgttcaccgaagtcagaaagtctcaattccaagctgaattcacctcctacttgaatgttgctactgctattccaaacctgatcttcttgatcctgaactccttgtatggtcacttggtttctatgaagtctagattgcaaggctccttgttcatagttactttggctttcttggttaccaccgctttggttcaagttgatactgatgattggcaaaacggcttcttcattattaccatggttaccgtcgttattatgactgctgcttctgctgtttttatcggtggtttggttggtattgcttccaggttctctaaagaatatatggctgctgttgtctccggtcaatctttaggtggtattttggctgcagttgcccaaattatctcattggcttttaagatctccccattgcattctgctttgatctacttcgttattgccgactttatggtcatctcctcattggtttcttacgccatgttgtacaagatcgatttcttcacccatcacattttgagaggttgtggtggtatggctgttaatagacatagagaagttaccatgaaggtcatcctgaaaaagatttgggtttacgccttctccatttttgctgttttcgctgtttcaatggctgtttatccagctgttactgttttggttgaatcccatccagttactaagggtactgattggaacaacatctactttgttccagtcgtcaactacttgattttcaactgtggtgattactccggtagattggttgctggtttcattttaagaccagataaccagtgggctattgctggtgcttctattttgagaatagttggtgttcccatgctgatgttgtgtaatgctcaacctagaaggcatttgccagttttgtttttgtgggattgggagtacatcctgattatgatcgttttcgctttcaccaacggttacttgactaacatcgttatgatcaactccaccagagttgttgaattgcacgaaagagaaaaagcctcttctgttattgctaccatgttgtctgttggtttgactgttggtgcagctgttggtatgttgttggttcatttcttgtaa

SEQ ID NO: 799 - protein, 449 aa, Bombyx mori
MDATGSINSDICVENDEDLIEDSEEKELVTDSCSTKVLNIEQPVDKYCIVYILFYLFGVSSLVPWNFLITANDYWMYKFRDVPPNNLTMEVRKTQFQAEFTSYLNVATAIPNLIFLILNSLYGHLVSLKSRLQSSLIVVTISFLVTTALVQVNTDEWQNGFFIITMVTVVIMTAASAVFIGGLVGIASRFSKEYMAAVVSGQSLGGIIAAVAQIISLAFKISPQHSALIYFIIADVLVITSLISYISLYKIDFFTHHILQGSGMVTNRHREVSMVNIMKKIWVYAFSIFAIFAISMAVYPAVTVLVESHPATKGTDWNNIFFVPVVNYLIFNCGDYSGRLVAGFLLRPLNQWVIAIASIIRIIGVPMLMLCNAKPRKHLPVLFLWDYEYIMIMIVFAFTNGYLTNIVMINSTRVVEFHEREKASSVIATMLSVGLTVGAAVGLLLVRVL

SEQ ID NO: 800 - DNA, 1350 bp, Bombyx mori
  source 1..1350: mol_type = other DNA
atggatgctaccggttccatcaactctgatatttgtgttgaaaacgacgaggatttgatcgaggactctgaagaaaaagaattggttaccgattcttgctccaccaaggttttgaatattgaacaaccagttgacaagtactgcatcgtctacattttgttctacttgttcggtgtctcttctttggtcccatggaattttttgattaccgctaacgattactggatgtacaagttcagagatgttccaccaaacaacttgaccatggaagttagaaagactcaattccaagctgagttcacctcttacttgaatgttgctactgctatcccaaacctgatcttcttgattctgaactccttgtacggtcacttggtttctttgaagtctaggttgcaatcctccttgatcgttgttaccatttctttcttggttaccaccgctttggttcaagttaatactgatgaatggcagaacggcttcttcattattactatggttaccgtcgttattatgaccgctgcttctgctgtttttattggtggtttggttggtattgcctccaggttctctaaagaatatatggctgctgttgtctccggtcaatctttaggtggtattattgctgcagttgcccaaattatctctttggcctttaagatctctccacaacattctgctttgatctacttcattatcgccgatgttttggtcatcacctcactgatttcttacatctcgttgtacaagatcgatttcttcacccatcatatcttgcaaggttctggtatggttacaaacagacacagagaagtttccatggtgaacatcatgaagaagatttgggtttacgccttctccatttttgctattttcgctatttccatggctgtttacccagctgttactgttttggttgaatctcatccagctactaagggtactgattggaacaacattttcttcgttccagtcgtcaactacttgattttcaactgtggtgattactccggtagattggttgctggttttttgctaagacctttgaaccagtgggttattgctattgcctctatcattagaatcatcggtgttcccatgttgatgttgtgtaatgctaagccaagaaagcacttgccagttttgtttttgtgggattacgagtacatcatgattatgatcgttttcgctttcaccaacggttacttgactaacatcgttatgatcaactccaccagagttgttgaattccacgaaagagaaaaagcctcttctgttattgccaccatgttgtctgttggtttgactgttggtgctgccgttggtttgttgttagttagagttttgtga

SEQ ID NO: 801 - protein, 476 aa, Anopheles culicifacies
MDFAANVRPLLQDTDDRETDSETFLDDVIAGSINASTSNINDPAKENATETRIISGGHRIAPTDKFNYTYLVFYLMGMTTMVPWNFFVTAEEYWQYKFRNVSSNDTSALTPRQLEFQSDLSIAAAVPGTVFLILNACIGHKVPLHVRMNGSLVFMLLIMIGTTALVRVDTDQWQDAFFNLTMLSVVVINSFSAILTGGLFGIAGQFSAHYMTAAVSGQALGGIFSAVADIIALTFASNPSTTAFVFFIVGCLVLLLSLVAYIVMSKTLFFKYYTCSKTLMKSSLEADPATREICARLEPQFPVVMRKIWIYGFSEWLVFVTTLSIYPAVTVLVGSQNHGRPWNDVYFLPVVNYLLFNTGDYLGRIFAGLFEWPWNNSILIGVLTIGRIAFVPAMLLCNITQHHNFPVLIHSDYIFIVLMAAFALSNGYLANIALIGAPRVVDPHEKEMASSMMAAFLGVGLACGSAISLMIIEMIK

SEQ ID NO: 802 - DNA, 1431 bp, Anopheles culicifacies
  source 1..1431: mol_type = other DNA
atggatttcgctgccaacgttagacctttgttgcaagatactgatgatagagaaaccgactctgaaaccttcttggatgatgttattgccggttctattaacgcttctacctccaatattaacgacccagctaaagaaaacgctaccgaaaccagaattatttccggtggtcatagaattgctccaaccgataagtttaactacacctacttggtgttctacttgatgggtatgactactatggttccttggaactttttcgttaccgctgaagaatattggcagtacaagttcagaaacgtcagctctaatgatacttctgctttgactccaagacaattggagttccaatccgatttgtctattgctgctgctgttccaggtactgttttcttgattttgaacgcttgcatcggtcataaggttccattgcatgttagaatgaacggctctttggttttcatgctgttgattatgattggtactaccgccttggttagagttgatactgatcaatggcaagatgccttcttcaacttgactatgttgtccgttgtcgtgatcaattccttctctgctattttgactggtggtttgtttggtattgctggtcaattttctgctcattacatgacagctgctgtttctggtcaagctttaggtggtattttttctgccgttgctgatattattgctttgacctttgcttctaacccatctactactgctttcgtttttttcatcgttggttgcttggtcctgttgttgtctttagttgcttacatcgttatgtccaagaccttgttcttcaagtactacacttgtagcaagacgctgatgaagtcatctttggaagctgatccagctaccagagaaatttgtgctagattggaaccacaattcccagttgttatgagaaagatttggatctacggtttctccgaatggttggtttttgttactaccttgtctatctacccagctgttactgttttggttggttctcaaaatcatggtagaccatggaacgatgtctactttttgcctgttgttaactacctgttgttcaacactggtgattacttgggtagaattttcgctggtttatttgaatggccatggaacaactccattttgatcggtgttttgaccattggtagaattgcatttgttccagctatgctgttgtgcaacattacccaacatcataacttcccagttttgatccactccgattacatcttcatagttttgatggctgctttcgctttgtctaatggttacttggctaacattgcattgattggtgctccaagagttgttgatcctcacgaaaaagaaatggcctcttctatgatggcagcctttttaggtgttggtttggcttgtggttcagctatttccttgatgattatcgagatgatcaagtaa

SEQ ID NO: 803 - protein, 486 aa, Chilo suppressalis
MEMSHQGGAEAESLLRHDQRSAAIMPYNKAIGWSLPEGESVPFLRNEPVKLTPAWEGTNLPNDTLNLKGVAMDLAPPKDKWNIIYIILIIHGLGTLIAWNMFITAKDYFVKYKLVNAGEYAENYLSYVGWAAQVPNCVFNWMNIFVPLRGSLTTRIVWSLILEVAIFVLTVILAMLDSSQWPGVFFWLTMASVFSLNALNAIFQNSVYGVAARLPPKYTGAVVLGSNVCGTIVVFMSWTSELFDSRRTSAIYYFITGIFVLLLCFDTYFALPLNRFYRYHDTLQQRTLLVNPALAATNQTIGPARTRIPYGTLFAQAWVQLYNIFIVFFVSLAVFPAIHSDIEPIQEGFLGGKFVLMTCYLTFNVTAMFGNVTANIWQFPSKKWLWVFTTLRILLIPFFLMCNYKPTIRTLPVWVTNDWVYWGVAALLGWSSGHGSSLGMMYVSSTVAPEHAATAGMIGAATLVTGIMSGLLFTRLGPALVTLPSP

SEQ ID NO: 804 - DNA, 1461 bp, Chilo suppressalis
  source 1..1461: mol_type = other DNA
atggaaatgtcccatcaaggtggtgctgaagctgaatctttgttgagacatgatcaaagatccgctgctattatgccatacaacaaagctattggttggtctttgccagaaggtgaatctgttccattcttgagaaatgaaccagttaagttgactccagcttgggaaggtactaatttgccaaatgataccttgaacttgaagggtgttgctatggatttggctccaccaaaagataagtggaacattatctacatcatcctgatcatccatggtttgggtactttgattgcttggaatatgttcattaccgccaaggattacttcgtcaagtacaagttggttaacgctggtgaatacgctgaaaactacttgtcttatgttggttgggctgctcaagttccaaattgtgtttttaactggatgaacatcttcgtcccattgagaggttctttgactactagaattgtctggtccttgattttggaagttgccattttcgttttgaccgttattttggccatgttggattcttctcaatggccaggtgtttttttctggttgactatggcttctgtgttctctttgaatgctttgaacgccatcttccaaaactctgtttatggtgttgctgctagattgccaccaaagtatactggtgctgttgttttgggttctaacgtttgtggtactatcgtcgtttttatgtcttggacttctgagttgttcgactccagaagaacttctgctatctactacttcatcaccggtatcttcgttttgttgttgtgtttcgatacctacttcgctttgccattgaataggttctacagataccatgacaccttgcaacaaagaacgttgttggttaatccagctttggctgctactaatcaaactattggtccagctagaaccagaattccatacggtactttatttgctcaagcttgggttcagctgtacaacatttttatcgtgttcttcgtttccttggctgttttcccagctattcattctgatatcgaacctatccaagagggttttttaggtggtaagtttgttttgatgacctgctacttgactttcaacgttactgctatgttcggtaatgttactgccaatatttggcaattccccagcaaaaaatggttgtgggttttcactaccttgaggattttgttgatccccttcttcttgatgtgtaactacaagccaactatcagaactttgccagtttgggttactaatgattgggtttattggggtgttgcagctttgttaggttggtcatctggtcatggttcttcattgggtatgatgtacgtttcttctactgttgctccagaacatgctgctactgctggtatgattggtgctgctacattggttactggtattatgtctggtttgttgttcactagattgggtccagctttagttactttgccatctccataa

SEQ ID NO: 805 - protein, 490 aa, Papilio xuthus
MEMTHQGGAEAESLLRPDQRSGVVMPQGRSGRWESGESEKLPFLRNEPVRLTPAWEGSNLPNDTLNLKGIAMDLAPPKDRWYLIYLTLVLHGLGTLTAWNMFITATDYFDKYKLANAPNLSQRYLTYVGWASQTPNLLFSWFNVFVKIGGNLTTRIVWSLIMEVMVFVVTVMLAMVDSSEWTVIFFWVTICTVFVLNAFNAVFQNSVYGVAARLPPQYTGAVVLGSNICGTLVTLLKWLSDTFTSSRRTSAIYYFIAGMFVLLICFDTYFALPLNRFYRYHETLQERTMRVNPALAATNQNASPAKQRTPYATIFKQAWIQLYNIFIIFFVTLSVFPEVQSKVQPITPGFLGENFTRLTCFLTFNLMAMIGNLTASFWQFPNPKWLWVFTTLRIVFIPVFLVCNYLPDERTLPVLVRADWLYWVLAVLLGWSSGHGSSLGMMYVSGTVAPEHASTAGMIGGAMLVTGIVSGITFSGTFRDVVSLKAWLSL

SEQ ID NO: 806 - DNA, 1473 bp, Papilio xuthus
  source 1..1473: mol_type = other DNA
atggaaatgacccatcaaggtggtgctgaagctgaatctttgttaagaccagatcaaagatccggtgttgttatgccacaaggtagatctggtagatgggaatctggtgaatctgaaaagttgccattcttgagaaacgaaccagttagattgactccagcttgggaaggttctaatttgccaaatgataccttgaacttgaagggtattgctatggatttggctccaccaaaagatagatggtacttgatctatttgaccttggtcttgcatggtttgggtactttgactgcttggaatatgttcattactgccactgattacttcgacaagtacaagttggctaatgctccaaacttgtcccaaagatacttgacttatgttggttgggcttctcaaaccccaaatttgttgttttcctggttcaacgttttcgtcaagattggtggtaacttgactactagaatcgtctggtctttgatcatggaagttatggttttcgttgtcaccgttatgttggctatggttgattcttctgaatggaccgttattttcttctgggttactatctgtaccgtgttcgttttgaatgctttcaacgctgttttccagaactctgtttatggtgttgctgctagattgccaccacagtatacaggtgctgttgttttgggttctaacatctgtggtactttggttactttgctgaagtggttgtctgatactttcacctcttcaagaagaacctctgctatctactacttcattgctggtatgttcgtcttgttgatttgcttcgatacttacttcgctttgccattgaacaggttttacagataccacgaaaccttgcaagaaagaaccatgagagttaatccagctttggctgctactaatcaaaatgcttctccagctaaacaaagaactccatacgctaccatttttaagcaagcttggatccagctgtacaacatcttcatcattttcttcgttaccctgtccgtctttccagaagttcaatctaaagttcagccaatcactccaggttttttgggtgaaaatttcactaggttgacctgtttcttgaccttcaatttgatggccatgatcggtaatttgaccgcttctttttggcaattcccaaatccaaaatggttgtgggttttcactaccttgagaatcgttttcatcccagttttcttggtctgtaattacttgccagacgaaagaactttgccagttttggttagagctgattggttgtattgggttttagccgttttgttaggttggtcatctggtcatggttcatctttgggtatgatgtatgtttctggtactgttgctccagaacatgcttctactgcaggtatgatcggtggtgctatgttagttactggtattgtctctggtattactttctccggtactttcagagatgttgtttctttgaaagcctggctgtctttgtga

SEQ ID NO: 807 - protein, 412 aa, Heliothis virescens
MDTSEPKDKWNLIFVTFLLHGLGTLTAWNMFITAKDYFVKYKLVNAPTYSEHYLAYVGWASQIPNLFFSWFNVFFKTKGDLTVRIVWSLVMEVVIFVCNVILAMVDSSDWPATFFWLTMISVFFLNGFNAIFQNSVYGVAAQLPSKYTGAVVMGSNLCGLLIVFLNWCSVLFDNPRTAAIYYFIGGMFVMLICIDSYFALPLNKFYRYHVNLQTQRNDAADNPKTNQGPRVSRAKIFAQASLQLYNVFITFFVSLAVFPSVISDIEPSTEGFLGENFVRITCFLTFNVMATLGNITASYKQIPGPKWLVVFTSIRLLFIPFFLLCKYKSKTRTLPILFDNDWVFWVGAVIMGWTSGHGSSLAMMYMGGTVAPENTGTAGMMGAAMLVTGILAGISFTRLCPIIVTAEFWRNL

SEQ ID NO: 808 - DNA, 1239 bp, Heliothis virescens
  source 1..1239: mol_type = other DNA
atggacacctctgaacctaaggataagtggaacttgattttcgtcaccttcttgttgcatggtttgggtactttgactgcttggaatatgttcattaccgccaaggattacttcgtcaagtacaagttggttaacgctccaacttactccgaacattatttggcttatgttggttgggcttcccaaattccaaatttgttcttctcctggttcaacgtgttcttcaaaactaagggtgatttgaccgttagaatcgtttggtctttggttatggaagttgttatcttcgtctgcaacgttatcttggctatggttgattcttctgattggccagctacttttttctggttgactatgatctccgttttcttcttgaatggtttcaacgccatcttccaaaactctgtttatggtgttgctgctcaattgccatctaagtatactggtgctgttgttatgggttctaacttgtgtggtttgctgatcgtttttttgaactggtgctctgttttgttcgataacccaagaactgctgctatctactactttattggtggtatgttcgtcatgttgatctgcatcgattcttactttgctctgccattgaacaagttctacagataccatgttaacttgcagacccaaagaaatgatgctgctgataaccctaagactaatcaaggtccaagagtttccagagctaagatttttgctcaagcttcactgcagctgtacaacgttttcattactttcttcgttagcttggccgtttttccatccgttatttctgatattgaaccatccactgaaggtttcttgggtgaaaacttcgttagaattacctgcttcttgaccttcaacgttatggctactttgggtaatatcaccgcttcctacaaacaaattccaggtccaaaatggttggtcgttttcacttctattaggttgttgtttatccccttcttcctgctgtgtaaatacaagtctaagactagaaccctgccaatcttgtttgataacgattgggttttttgggttggtgccgttataatgggttggacttctggtcatggttcttcattggctatgatgtatatgggtggtactgttgctccagaaaacactggtactgctggtatgatgggtgctgctatgttagttactggtattttggctggtatctccttcactagattgtgcccaattatagttaccgccgaattttggagaaacctgtga

SEQ ID NO: 809 - protein, 365 aa, Cucumis melo var. makuwa
MDKEQQQHQQNTSAVKRTLLIFNCFLLAVGNCGGPLVMRLYFVHGGNRVWLSSFLETGGWPIIFIPLLISYIRRRRLAALDPSGSADSSQIIFMKPRLFLASAVIGILTGFDDYLYAYGVARLPVSTSALIIACQLAFTAGFAFLLVKQKFTSYSINAVVLLTIGGAVLALHTSGDRPAGESNKDYIAGFLMTVAAAVVYGFILPLVELTYKKARQQITYTLVLEYQLIMSLFATIVCVIGMLINNDFQVIPREAETFGLGKFRYYLVLVLSAILWQGFFLGAIGVIFSSSSLFSGIVIAVLLPVTEILAVIIFNEKFQAEKAVSLALNLWGFVSYFYGEIKNNKKKKLELQRYEETASTQITNV

SEQ ID NO: 810 - DNA, 1098 bp, Cucumis melo var. makuwa
  source 1..1098: mol_type = other DNA
atggacaaagaacaacaacagcaccaacaaaacacatccgctgttaagagaaccttgttgattttcaactgcttcttgttggctgttggtaattgtggtggtccattggttatgaggttgtactttgttcatggtggtaacagagtttggctgtcctcttttttggaaactggtggttggccaattatcttcattcctttgttgatctcttacatcagaagaagaagattggctgctttggatccatctggttctgctgattcttctcaaatcattttcatgaagcccaggttgtttttggcttctgctgttattggtattttgaccggtttcgatgattacttgtatgcttatggtgttgccagattgccagtttctacttccgctttgattattgcttgtcaattggcttttactgctggtttcgctttcttgttagtcaagcaaaagttcacctcctactccattaacgccgttgttttgttaactattggtggtgcagttttggccttgcatacttctggtgatagacctgctggtgaatctaacaaagattacattgccggtttcttgatgactgttgctgctgcagttgtttacggtttcattttgccattggttgagttgacctacaagaaggctagacaacaaattacctacaccttggtcttggaataccagttgattatgtctttgttcgctaccatcgtttgcgttataggcatgttgattaacaacgacttccaagtcattccaagagaagctgaaactttcggtttaggtaagttcaggtactacttggttttggttttgtccgctattttgtggcaaggttttttcttgggtgctatcggtgttatcttctcctcatcatctttgttctccggtatcgttattgccgttttgttgccagttactgaaattttggccgtgatcatcttcaacgaaaagttccaagctgaaaaggctgtttctttggctttgaatttgtggggttttgtctcttacttctacggtgaaatcaaaaacaacaaaaagaagaagctggaactgcagagatacgaagaaactgcttcaacccaaatcaccaacgtttga

SEQ ID NO: 811 - protein, 372 aa, Prunus persica
MEASHEEKRNASLKRALLILSCVLLSIGTCGGPLIMRLYFIHGGKRVWLSSWLETGGWPIIFIPIALAYYHRRTTEGPSTKLFFIKLPLFIASAVIGLITGLDDYLYAYGVARLPVSTSSLIIAAQLAFTALFAFLLVKQKFTSYSTNAVVLLTIGAAVLGLNTNADRPKGESDKEYIAGFLMTVAAAALYGFVLPLVELTYKKAKQTITYALVLEIQMVMCLFATIFCTVGMLINNDFKVILREARNFGLGKGTYYVVLVLSAIVWQTFFLGAIGIIFCASSLLSGIVIAVLLPITEILAVIFYHEKFQAEKGVALALSLWGFVSYFYGEIKYSKQRENEKKNEKEKEKEKEIEIETKDTPETADVSQLDP

SEQ ID NO: 812 - DNA, 1116 bp, Prunus persica
  source 1..1116: mol_type = other DNA
atggaagcctctcacgaagaaaagagaaacgcttctttgaagagagccttgttgattttgtcttgcgtcttgttgtctattggtacttgtggtggtccattgattatgaggttgtactttattcacggtggtaagagagtttggttgtcatcttggttggaaactggtggttggccaattatctttattccaattgctttggcctactaccatagaagaactactgaaggtccatctaccaagttgttcttcattaagttgcctctgttcattgcctctgctgttattggtttgattaccggtttggatgattacttgtatgcttacggtgttgctagattgccagtttctacttcctctttgattattgctgctcaattggctttcactgctttgtttgctttcttgttggtcaagcaaaagttcacctcttactctaccaatgccgttgttttgttaactattggtgctgcagttttgggtttgaacactaatgctgatagaccaaaaggtgagtctgacaaagagtacattgctggttttttgatgactgttgctgctgctgcattatacggttttgttttgccattggttgagctgacttacaagaaggctaagcaaactattacctacgccttggttttggaaatccaaatggttatgtgtttgttcgccaccattttctgtactgttggcatgttgattaacaacgacttcaaggtcattttgagggaagctagaaatttcggtttaggtaagggtacttactacgtcgttttggttttgtctgctatagtttggcaaacctttttcttgggtgctatcggtattatcttctgcgcttcttctttgttgtccggtatagttattgctgtgttgttgccaattaccgaaatcttggctgttatcttctaccacgaaaagttccaagctgaaaagggtgttgctttagctttgtctttgtggggtttcgtttcttacttttacggtgagatcaagtactccaagcaacgtgaaaacgaaaagaagaacgagaaagaaaaagaaaaagagaaagaaatcgagatcgagactaaggatactccagaaactgctgatgtttctcaattggatcca

SEQ ID NO: 813 - protein, 356 aa, Actinidia chinensis var. chinensis
MEMDQNASKRMKRLLLLLNAILLSIGNCGGPLIMRLYFVHGGKRVWLSSWLETGGWPIIFVPLLITYLQRRRKAGGSGTKVFFMEGPVFIASMVIGILTGFDDYLYAYGVARLPVSTSSLVIASQLGFTALFAFLLVKQKFTPYSINAVALLTIGAGVLALHSNSDRPKGESNREYYLGFFMTIAAAVMYGLILPMVELTYKKAKQEITYTLVLEIQLVMCFFATVVCTIGMIVNNDFQAIPREARAFGLGETKYYVVMVCSGIIWQCFFLGAIGVIFAGSSLLSAIIIAVLLPVTEVLAVIFYQEKFQAEKGVSLVLSLWGFISYFYGELKHSKKESKTLIPETEMPQTISSSNP

SEQ ID NO: 814 - DNA, 1071 bp, Actinidia chinensis var. chinensis
  source 1..1071: mol_type = other DNA
atggaaatggaccaaaacgcctccaaaagaatgaagaggttgctgttgttgttgaacgccattttgttgtctattggtaattgtggtggtcccttgattatgaggttgtactttgttcatggtggtaagagagtttggttgtcatcttggttggaaactggtggttggccaattatctttgttcctttgttgatcacctacttgcagcgtagaagaaaagctggtggttctggtacaaaggtttttttcatggaaggtccagttttcattgcctccatggttattggtattttgaccggttttgacgattacttgtatgcttatggtgttgccagattgccagtttctacttcctctttggttattgcttctcaattgggtttcactgctttgttcgctttcttgttggttaagcaaaagttcaccccatactccattaacgctgttgctttgttaactattggtgctggtgttttggccttgcattctaattctgatagaccaaagggtgagtctaacagagaatattacttgggtttcttcatgaccattgctgctgctgttatgtacggtttgattttgccaatggttgagttgacttacaagaaggccaagcaagaaattacctacaccttggttttggaaatccaactggttatgtgtttcttcgctactgttgtctgtaccattggtatgatcgttaacaacgatttccaagccattccaagagaagctagagcttttggtttgggtgaaactaagtactacgttgttatggtttgctccggtattatttggcaatgttttttcttgggtgccatcggtgttatttttgctggttcttctttgctgtccgctattatcattgctgtcttgttgccagttactgaagttttggctgttatcttctaccaagaaaagttccaagctgaaaagggtgtttctttggttttgtctttgtggggtttcatctcttacttctacggtgaattgaagcactccaagaaagaatccaagaccttgattccagaaaccgaaatgccacaaaccatctcttcatctaacccatga

SEQ ID NO: 815 - protein, 354 aa, Erythranthe guttata
MKRVFLIINCIILAVGNCGGPLIMRLYFVHGGKRIWFSSWLETGGWPIILAPLIVSYTRRRRTAAAGKAELYLMKPRVFVAAAVIGVLTGFDDYLYAYGVAKLPVSTSALIVASQLAFTAVFAFLMVKQEFTAYSVNAVVLLTLGAVVLGLHTSGDRPEGESSKEYMVGFLLTVAAAALYGFILPAVELTYKKAKQAVSYTLVLEMQLVMCVFATSFCTVGMLVNNDFQAIAREARAYELGETKYYIVVLWSAIVWQCFFLGAIGVIFYSSSLLSGIVITVLLPATEILAIIFYHEKFQAEKGLSLFLSLWGFISYFYGEMKKDKNKNKNNIDQSNDQTQATETELTHRVVINP

SEQ ID NO: 816 - DNA, 1065 bp, Erythranthe guttata
  source 1..1065: mol_type = other DNA
atgaagagggtgttcctgatcatcaactgcattattttggctgttggtaattgtggtggtccattgattatgaggttgtactttgttcatggtggtaagagaatctggttctcttcttggttggaaactggtggttggccaattatcttggctccattgatagtttcttacaccagaagaagaaggactgctgctgctggtaaagctgaattatacttgatgaagccaagagtttttgttgctgctgcagttattggtgttttgactggttttgatgattacttgtacgcttacggtgttgctaaattgccagtttctacttctgctttgatcgttgcttctcaattggcttttactgctgttttcgctttcttgatggtcaagcaagaattcactgcttactctgttaacgccgttgttttgttgactttgggtgctgttgttttgggtttacacacttctggtgatagaccagaaggtgaatcctccaaagaatatatggttggtttcttgttgactgttgcagctgctgccttgtatggtttcattttgccagctgttgaactgacttacaagaaagctaaacaagctgtctcttacaccttggtcttggaaatgcaattggttatgtgtgttttcgccacttctttctgtactgttggtatgttggttaacaacgacttccaagctattgctagagaagctagagcttatgaattgggtgaaacgaagtactacattgtcgttttgtggtctgctatagtttggcaatgttttttcttgggtgccatcggtgttatcttctactcttcttctttgttgtccggtatcgttatcacagttttgttgccagctactgaaattttggccatcattttctaccacgaaaagttccaagctgagaagggtttgtctttgtttttgtcattgtggggcttcatctcttacttctatggtgaaatgaagaaggataagaacaaaaacaagaacaacatcgaccagtccaacgaccaaactcaagctacagaaactgaattgacccacagagttgttatcaacccatga

SEQ ID NO: 817 - protein, 348 aa, Corchorus capsularis
MKKALLLINCLVLAIGNCGGPLMMRLYFLHGGKRVWFSSWLETGAWPVILFPIACVYVHRRKTQPGAKLFLMKLPLFVASAVIGVITGFDDYLYAYGVARLPVSTSSLIIASQLAFTAGFAFLLVKQKFTSYSINAVFLLTIGAGVLALHTSSDRPENESNKEYVLGFLMTVAAAVLYGFILPLVELMYKKARQELSYALVMEIQMVMCLFATVFCTVGMVVNNDFKVISREAREFGLGETNYYVLAVLTAIIWQCFFLGAIGVIFCSSSLLSGIVIAVLLPVTEILAVIFYKEKFQAEKGVSLALSLWGFFSYFYGEMKHAKKMKPTTTAETELPQAQQVPIRLESA

SEQ ID NO: 818 - DNA, 1047 bp, Corchorus capsularis
  source 1..1047: mol_type = other DNA
atgaagaaggccctgctgttgattaactgtttggttttggctattggtaactgtggtggtccattgatgatgaggttgtactttttacatggtggtaagagagtctggttctcttcttggttggaaactggtgcttggccagttattttgtttccaattgcttgcgtttacgtccacagaagaaaaactcaaccaggtgctaagttgttcttgatgaagttgcctttgtttgttgcctctgctgttattggtgttattaccggttttgacgattacttgtatgcttacggtgttgctagattgccagtttctacttcctctttgattatcgcttctcaattggcttttactgctggttttgctttcttgttggtcaagcaaaagttcacctcctactctattaacgccgtttttttgttgactattggtgctggtgttttggccttgcatacttcttcagatagaccagaaaacgagtccaacaaagaatacgttttgggctttttgatgactgttgctgcagctgtcttgtacggtttcattttgccattggttgagctgatgtacaagaaggctagacaagaattgtcttacgccttggttatggaaatccaaatggttatgtgtttgttcgctaccgttttctgtactgttggtatggttgtcaacaacgatttcaaggttatttccagagaagccagagaatttggtttgggtgaaactaactactacgtcttggctgttttgaccgctattatttggcaatgttttttcttgggtgccatcggcgttattttctgttcttcttctttgctgtccggtatcgttattgctgttttgttgccagttaccgaaattttggctgtcatcttctacaaagaaaagttccaagctgaaaagggtgtctctttggctttgtctttgtggggttttttctcttacttctacggtgaaatgaagcacgctaaaaagatgaagcctactactactgctgaaaccgaattgccacaagctcaacaagttcctattagattggaatccgcttaa

SEQ ID NO: 819 - protein, 346 aa, Handroanthus impetiginosus
MKRTFLIINCIILAVGNCGGPLIMRLYFIHGGKRIWFSSWLETGGWPIILLPLLFSYMRRRSTTANAKPILMKPRVFFAAAVIGIVTGLDDYLYAYGVAKLPVSTSALIIATQLAFTAAFAFVLVKQKFTAYSINAVVLLTAGAVVLGLHTNGDRPAGESNKDYWLGFFLTVAAAALYGFILPLIELMYKKARQELTYTLVMEIQLVMCFFATVFCTVGMIINNDFQAISREAKEYELGETKYYLVVAWSAIIWQCFFLGAIGVIFYSSSLLSGIIITVLLPVTEILAVISYHEKFQAEKGISLFLSLWGFISYFSGEIKHSKKNKDNLNDDQPSEVQLAHQDSVP

SEQ ID NO: 820 - DNA, 1041 bp, Handroanthus impetiginosus
  source 1..1041: mol_type = other DNA
atgaagaggaccttcctgatcatcaactgcattattttggctgttggtaattgtggtggtccattgatcatgaggttgtactttattcatggtggtaagaggatctggttctcttcttggttggaaactggtggttggccaattatcttgttgcctttgttgttctcctacatgagaagaagatctactactgctaacgccaagccaattttgatgaagccaagagtttttttcgctgctgctgttattggtatcgttactggtttggatgattacttgtatgcttacggtgttgctaagttgccagtttctacttccgctttgattattgctactcaattggcttttactgctgctttcgctttcgttttggttaagcaaaagttcaccgcctactctattaacgctgttgttttgttgactgctggtgcagttgttttgggtttacacactaatggtgatagacctgctggtgaatctaacaaagattattggttgggtttcttcttgactgttgctgctgcagccttgtatggtttcattttgccattgatcgagctgatgtacaagaaggctagacaagaattgacttacaccttggtcatggaaatccaattggttatgtgtttcttcgctaccgttttctgtaccgttggtatgattatcaacaacgatttccaagccatttccagggaagctaaagaatatgaattgggcgaaacgaagtactacttggttgttgcttggtctgctattatttggcaatgctttttcttgggtgccatcggtgttattttctactcttcttctttgctgtccggtatcattatcacagttttgttgccagtcaccgaaattttggccgttatttcttaccacgaaaagttccaagctgagaagggtatttctctgtttttgtctttgtggggcttcatctcttatttctccggtgaaatcaaacactccaagaagaacaaggataacttgaacgatgaccaaccatccgaagttcaattagctcatcaagattctgtcccataa

SEQ ID NO: 821 - protein, 380 aa, Macleaya cordata
MEGVLSYNNQEHHHQEQQQQPKIKKNKNIKLGLLLLNCLLLSVGQVGGPLLLRLYYLHGGQRKWLTSWLQTAAFPILLIPLFASWSNKSRSQSSTNSNPSSTKQKFLLNPKLFIASAILGTLIGLDSFLFALGLSYLPVSTSALLMATQLAFTSVFALLLVKQKFTPYSINSVVLLTLGSIILGLHTSGDRPVGVSNGQYFLGFFMTLGAAALLGFILPSVEFAYAKACKVITYDLVIQMQFLVSMFATLLCTIAMIINKDFQAISREAKEYGLGEAKYYMVLIGAAILMQSMLVGNLGVIFCSTSLFSGVLLALLLPVQQIFAIIFFNEKFNAEKGMSLALSFWGFASYFYGEYKQTKKNNKLIISMTTHQHQEFPNVV

SEQ ID NO: 822 - DNA, 1143 bp, Macleaya cordata
  source 1..1143: mol_type = other DNA
atggaaggcgtcctgtcctacaacaatcaagaacatcatcaccaagaacaacaacagcagccaaagattaagaagaacaagaacattaagctgggcctgttgttattgaactgcttgttgttatctgttggtcaagttggtggtcctttgttgttgagactatattacttgcatggtggtcagagaaagtggttgacttcttggttgcaaactgctgcttttccaattttgttgattcctttgttcgcctcctggtctaacaaatctagatctcaatcttccaccaacagcaatccatcttctactaagcaaaagttcctgctgaatcccaagttgtttattgcttctgctatcttgggtactttgatcggtttggattctttcttgtttgccttgggtttgtcttacttgccagtttctacttctgctttgttgatggctactcaattggctttcacttctgtttttgccctgttgttggtgaaacaaaagttcactccatactccatcaactccgttgttttgttgactttgggttccattattttgggcttgcatacttctggtgatagaccagttggtgtttctaatggtcaatacttcttgggtttcttcatgactttaggtgctgcagctttgttgggtttcattttgccatctgttgaattcgcttacgctaaggcttgtaaggttattacctacgatttggtcatccagatgcagttcttggtttctatgtttgctactctgttgtgcaccattgccatgattattaacaaggatttccaggccatttccagggaagctaaagaatatggtttgggtgaagctaagtactacatggttttgattggtgctgccatcttgatgcaatctatgttggttggtaatttgggcgttattttctgctctacctctttgttttccggtgttttattggccttgttgttgccagttcaacaaattttcgccatcattttcttcaacgagaagttcaatgctgagaagggtatgtctttggctttgtctttttggggttttgcctcttacttttacggtgagtacaagcagactaagaaaaacaacaagttgatcatctccatgactacccaccaacatcaagaatttccaaacgttgtctaa

SEQ ID NO: 823 - protein, 366 aa, Artemisia annua
MDNHISVTNTVPMTAKVSPAAKKTLLILNCILLSIGNCGGPLIMRLYFVHGGHRVWLSSFLETAGWPFIVLILIVLFFIRRKSNTKTTIIYMRPRLFFATAFIGIITGLDDYLYAYGVKRLPVSTSALIIASQLGFTAFFAYILVKLKFTPYSINAVVLLTVGAGVLALHTSSDRPKGESKKEYMLGFIMTLAAALLYGFILPLIELTYNKAKQAITYTLVLEIQMVMCLFATIFCTVGMIVNNDFKVIPREATEYGLGETNYYTILCASALIWQCFFLGAIGVIFCASSLLSGIIIAVLLPVTETLAVVFFKEKFQAEKGVSLVLSLWGFASYFYGEYKSTKKPKDILESTKQSMELPLSDYSRV

SEQ ID NO: 824 - DNA, 1101 bp, Artemisia annua
  source 1..1101: mol_type = other DNA
atggacaaccacatctctgttaccaacactgttccaatgactgctaaagtttctccagctgctaaaaagaccttgttgattttgaactgcatcctgttgtctattggtaattgtggtggtcctttgatcatgaggttgtactttgttcatggtggtcacagagtttggttgagttcttttttggaaactgctggttggccattcatcgttttgatattgatcgtcctgttcttcatcaggcgtaagtctaataccaagaccaccattatctatatgaggccaagattattcttcgccactgccttcattggtattattactggtttggacgattacttgtatgcctacggtgttaagagattgccagtttctacttccgctttgattattgcttctcaattgggtttcactgctttcttcgcttacatcttggttaagttgaagttcaccccatactccattaacgctgttgttttgttgactgttggtgctggtgttttggcattgcatacttcatctgatagaccaaagggtgagtctaagaaagaatatatgttgggcttcattatgaccttggctgctgctttgttgtacggtttcattttgccattgatcgagttgacttacaacaaggctaagcaagctattacctacaccttggttttggaaatccaaatggttatgtgtttgttcgccaccattttctgtactgttggtatgatcgttaacaacgacttcaaggttattccaagagaagctactgaatacggtttgggtgaaactaactactataccattttgtgtgcctctgccttgatttggcaatgttttttcttgggtgctatcggtgttattttctgcgcttcttctttgttgtccggcattattatcgctgtcttgttgccagttactgaaactttggccgttgtgttcttcaaagaaaagttccaagctgaaaagggtgtctctttggttttgtctttgtggggttttgcttcttacttttacggtgagtacaagtctactaagaagccaaaggatatcttggaatccaccaagcaatctatggaattgccattgtctgattactccagagtctga

SEQ ID NO: 825 - protein, 377 aa, Cynara cardunculus var. scolymus
MKNGTDTTTAGTTAPLSAKVSPAAKKTLLILNCILLSIGNCGGPLIMRLYFIHGGNRVWLSSSLETAGWPFIVVVLVILYFLRRSAGKHENNNNNKPTTIIYMRPRLFFAVAFIGIVTGLDDYLYAYGVARLPVSTSSLIIASQLGFTAFFAYLLVKQKFTPYTINAVVLLTVGAAVLALHTSSDRPAGESKKEYTLGFVMTVAAALLYGFILPLIELTYNKAKQGITYTLVLEIQMVMCLFATIFCTVGMIINNDFKVIPREAMDFELGKTKYYIIMCVSALIWQCFFLGAIGVIFCSSSLLSGIIIAVLLPVTEVLAVVFYKEKFQAEKGVALVLSLWGFASYFYGEYKLTKKSKNNTESSQPSTELAQTNYSSV

SEQ ID NO: 826 - DNA, 1134 bp, Cynara cardunculus var. scolymus
  source 1..1134: mol_type = other DNA
atgaagaacggtactgataccactactgctggtactactgctccattgtctgctaaagtttctccagctgctaaaaagaccttgttgattttgaactgcatcctgttgtctattggtaattgtggtggtccattgatcatgaggttgtactttattcatggtggtaacagagtctggctgtcatcttctttggaaactgctggttggccttttatcgttgttgttttggttatcctgtacttcttgagaagatctgctggtaaacatgagaacaacaacaacaacaagccaaccaccattatctatatgaggccaagattattcttcgccgttgcttttattggtatcgttactggtttggacgattacttgtatgcttatggtgttgctagattgccagtttctacctcctctttgattattgcttctcaattgggtttcaccgctttctttgcttacttgttggttaagcaaaagttcaccccatacaccattaacgcagttgttttgttgactgttggtgctgctgttttggcattgcatacttcatctgatagacctgctggtgaatctaagaaagagtacactttgggtttcgttatgacagttgctgctgctttgttgtacggtttcattttgccattgatcgagttgacttacaacaaggctaagcaaggtattacctacaccttggttttggaaatccaaatggttatgtgtttgttcgccaccattttctgtaccgttggtatgatcattaacaacgacttcaaggtcattccaagagaagctatggatttcgaattgggtaagaccaagtactacatcatcatgtgtgtttccgctttgatttggcaatgttttttcttgggtgccatcggcgttattttctgttcttcttctttgttgtccggcatcattattgcagttttgttgccagttactgaagttttggctgtcgtgttctacaaagaaaagttccaagctgaaaagggtgttgctttggttttgtctttgtggggttttgcttcttacttttacggtgagtacaagctgactaagaagtctaagaacaacaccgaatcttcccaaccatctactgaattggctcaaactaactactcctccgtttga

SEQ ID NO: 827 - protein, 519 aa, Spodoptera exigua
MFLYIFVTLLILLYYVITRKYDYWKVRNVPHSKPTFLLGNYGDMILRKKSFGENLQDRCNDFPEAKYIGAFFGTEPVLIPKDPEIIKLIVTKDFYYFNGRELSKFNHLEPAALNLFATYGDNWRVLRQNMTPLFSSAKMKNMFHLIDKCSCVFEEMLDREIKISNELEVRSMTSRYTMECIGACAFGVDTNTMAEGVEENPFKKIAAFVEPPTYLVYVRMVRSIWPSLFYLFGGRLLTKQLEFFDNLITSVMSKREYKSSGRHDFVDLVMSWKQSHQIVGDSISNMKTGDHKKVTLEANDDLLVAQCFVFFAAGFETSSTTLSYTLYELAKHKDIQEKVLHGVDAYLARHGNKLNYDCVTELPYLDAVIDETLRFYPVLGMIPRELMEDYIMPDGTKLTKGLRVHLPVFYLHHNPENYPEPEVFRPERFLGEEKRNINPYVYLPFGEGPRTCIGMRFAKMQMLAGLITMLKKYRLELADGMPTKLKFKAQSFITHPVGGIKIKFIEREGWESRVFAKDN

SEQ ID NO: 828 - DNA, 1557 bp, Spodoptera exigua
  source 1..1557: mol_type = other DNA
atgttcctgtacatcttcgtcaccctgttgattttgttgtactacgttatcacccgtaagtacgattactggaaggttagaaatgttccacattccaagccaactttcttgttgggtaattacggtgacatgatcctgcgtaaaaagtcttttggtgaaaacttgcaagacaggtgtaacgattttcctgaagctaagtacattggtgctttctttggtactgaaccagttttgattccaaaggacccagaaatcatcaagttgatcgttaccaaggacttctactacttcaacggtagagaactgtctaagttcaaccatttggaaccagctgctttgaatttgtttgctacctatggtgataattggagagtcttgagacaaaacatgacccctttgttctcttcagctaagatgaagaacatgtttcacctgatcgataagtgctcttgcgttttcgaagaaatgttggacagagaaatcaagatcagcaacgaattggaagtcagatctatgacttctaggtacaccatggaatgtattggtgcatgtgcttttggtgttgatacaaacactatggctgaaggtgttgaagaaaacccattcaaaaagattgctgcctttgttgaaccaccaacctatttggtttacgtcagaatggttagatccatctggccatctttgttttacttgttcggtggtagactgttgaccaagcaattggaatttttcgacaacttgatcacctccgtcatgtctaaaagagagtacaaatcttccggtagacacgatttcgttgatttggttatgtcttggaagcaatcccatcaaatcgttggtgattctatctctaacatgaagaccggtgatcataagaaggttactttggaagctaacgatgatttgttggttgctcaatgctttgtttttttcgctgctggttttgaaacttcctctactacattgtcttacaccttgtacgaattggctaagcacaaggatattcaagaaaaggtcttgcacggtgttgatgcttatttggctagacatggtaacaagttgaactacgattgtgttaccgaattgccatacttggatgctgttattgacgaaaccttgagattctatccagtcttgggtatgattccaagggaattgatggaagattacatcatgccagatggtacgaaattgactaagggtttgagagttcatctgcccgttttttacttgcatcataacccagaaaattacccagaaccagaagttttcagaccagaaagattcttgggtgaagaaaagagaaacatcaacccatacgtttacttgccatttggtgaaggtccaagaacttgtattggtatgagattcgctaagatgcaaatgttggctggtttgattaccatgctgaagaagtacagattggaattggctgatggtatgccaacgaagttgaagtttaaggcccaatctttcattacccatccagttggtggtattaagatcaagttcatcgaaagagaaggttgggaatctagagttttcgctaaggataac

SEQ ID NO: 829 - protein, 520 aa, Manduca sexta
MFNILLIVFGVLFVVYYLTTRKFNYWKKINVPHLPPVPLFGNYASMILQRKTFGEVVSDICEKFPKAPVVGAYFGTEPVLIPRDPEVIKTILTKDFYYFNGREVSEYAHRDGDLFTLFATYGDHWKVLRQNLTPLFSSAKMKNMFKMITQNAHAFEKLLEQDTKQEVLDVKNMMERFTIECIGSCVFGVATNTIEKGEANPFKKAGNDIIKPNKMLAFKGVMRAIWPSIFYGLRIPLFTNELNLFRQVLTAVFKERETNPTKTQDFINLIMKWKQQSHIEGDKLRPAHSAENGKTSVDVTDELVRAQCVVFFATGFETSAVTLTHTLYELSKNERVMQKACEEVDAFMKRYNNHMTYESLSELQYLDACLDEALRKYPVLGCITREVMHDYILSPGIHIEKGMRVHIPVQYLQNNANLFPEPEEYRPERFIGEEKRNIIPYSYMPFGEGPRICIGMRFAKMQMLAGLVTVLKSYKVTLGDNVPKKLRFLPESFVTVSADRIKLKFTRRNGWEKALYAQHS

SEQ ID NO: 830 - DNA, 1560 bp, Manduca sexta
  source 1..1560: mol_type = other DNA
atgttcaacatcctgctgatcgttttcggtgttttgttcgttgtttactacttgaccaccagaaagttcaactactggaagaagattaacgttccacatttgccaccagttcctttgtttggtaattacgcttctatgatcttgcagagaaagacctttggtgaagttgtttccgatatctgtgaaaagtttccaaaggctccagttgttggtgcttattttggtactgaaccagttttgattccaagggatccagaagttattaagaccatcttgaccaaggacttctactactttaacggtagagaagtttccgaatacgctcatagagatggtgatttgtttactttgttcgctacctatggtgatcactggaaagttttgagacaaaacttgacccctttgttctcctcagctaagatgaagaatatgttcaagatgatcacccaaaacgctcatgctttcgaaaagttgttggaacaagataccaagcaagaagttttggacgtcaagaatatgatggaaaggttcaccattgaatgcatcggttcttgtgtttttggtgttgctaccaacactatcgaaaagggtgaagctaatccattcaaaaaggctggtaacgatatcatcaagcccaacaaaatgttggctttcaagggtgttatgagagctatttggccatctattttctacggtttgagaattcccttgttcaccaacgaattgaacttgttcagacaagttttgaccgccgtgttcaaagaaagagaaactaatccaactaagacccaggacttcatcaacttgattatgaagtggaagcaacagtcccatatcgaaggtgataagttaagaccagctcattctgctgaaaacggtaagacttctgttgatgttaccgatgaattggttagagcccaatgtgttgtttttttcgctactggttttgaaacctctgctgttactttgactcataccttgtacgagttgtccaagaacgaaagagttatgcaaaaagcttgcgaagaggttgatgctttcatgaagagatacaacaaccacatgacctacgaatccttgtcagaattgcaatacttggatgcttgtttggatgaagccttgagaaagtatccagttttgggttgtattaccagagaagttatgcacgactacattttgtctccaggtattcacattgagaagggtatgagagttcatatcccagttcaatacttgcaaaacaacgctaacttgttcccagaaccagaagagtatagacctgaaagattcattggtgaagagaagaggaacatcatcccatattcttacatgccattcggtgaaggtccaagaatctgtattggtatgagattcgctaagatgcaaatgttagctggtttggttactgtcctgaagtcctacaaagttaccttgggtgataatgtcccaaagaagttgagattcttgccagaatccttcgttactgtttctgctgataggatcaaactgaagttcactagaagaaacggttgggaaaaagccttgtatgctcaacattct

SEQ ID NO: 831 - protein, 521 aa, Trichoplusia ni
MIATLLLITLSVIAYSVYHFSRRKFTYWEKRNVPHLKPKTIFGNYENFILQKENLGENTRKLCETFPDAPLIGAYYGTEPSLIVQDPELIKLVTTKDFYYFSGREVSEHSHKEMFTRNLFFTYGDRWKALRQNLSPIFSSSKMKQMFHLIDNCSFVLENMLDQEAKTSKGLDVKIILTRYTMDCICSSAFGVEAQAMVNTENNVFNHMGELVTESSPAAAFRNVCKTIWPSLFYGLGFTVFSKEIDDFFNKLLTQIFNSRNYEPTTRNDFIDYMLKMKKNKLVGDSLNNLKSDSASKVTLDIDDEFLIAQCVLFFVAGFETTSTTLMFTLFELAKNPVKQVKAIEEVDEYLRRHGNKLKYECVAESLYLDACVDETLRLYPVLGMVGRETVQDYVFPSGVKIDKGMRIFLPLYQLHYNPEYFPEPKEYRPERFYGEEKRNIKPYTYMPFGEGPRICIGMRFAKMVMMAGLITILKKYRVELPPGMKTDVNFDPKPVVTQPMGGIELKFIEREGWETRVLAK

SEQ ID NO: 832 - DNA, 1563 bp, Trichoplusia ni
  source 1..1563: mol_type = other DNA
atgatcgccaccttgttgttgatcaccttgtctgttattgcctactccgtttaccatttctccagaagaaagttcacttactgggaaaagagaaacgttccacatttgaagccaaagaccattttcggtaactacgagaacttcatcctgcagaaagaaaacttgggtgaaaacaccagaaagttgtgtgaaacttttccagatgctccattgattggtgcttattatggtactgaaccatccttgatagttcaggatccagaattgattaagttggttaccaccaaggacttctactacttttctggtagagaagtctctgagcactctcacaaagaaatgtttacccgtaacttgttcttcacctatggtgatagatggaaggctttgagacaaaacttgtccccaattttctccagctctaagatgaagcaaatgttccacttgatcgacaactgctctttcgttttggaaaacatgttggatcaagaagccaagacctctaaaggtttggatgttaagattatcttgaccaggtacaccatggactgtatttgttcttctgcttttggtgttgaagctcaagctatggttaacaccgaaaacaacgttttcaatcacatgggtgaattggtcactgaatcttcaccagctgctgcttttagaaatgtctgtaaaactatctggccctccttgttttatggtttgggttttaccgtgttctccaaagagattgacgatttcttcaacaagctgttgacccagattttcaactctagaaactacgaacctaccaccagaaacgatttcatcgattacatgctgaagatgaagaaaaacaagttggtcggtgactccttgaacaacttgaaatctgattctgcttccaaggtcactttggatatcgatgatgaattcttgattgcccaatgcgtgttgttttttgttgctggttttgaaactacctccaccactttgatgttcaccttgtttgaattggctaagaacccagttaagcaagttaaggctattgaagaagtcgacgaatacttgagaaggcatggtaacaaattgaagtacgaatgcgttgccgaatccttgtatttggatgcttgtgttgacgaaactttgaggttgtatccagttttaggtatggtcggtagagaaaccgttcaagattatgtttttccatccggtgttaagatcgacaagggtatgagaattttcttgcccttgtaccaattgcactacaacccagaatatttcccagaacctaaagagtacagaccagaaagattctacggtgaagaaaagaggaacattaagccatacacttacatgccatttggtgaaggtccaagaatctgtattggtatgagattcgctaagatggttatgatggctggtttgattaccatcctgaagaagtacagagttgaattgccaccaggtatgaagactgatgttaattttgatccaaagccagttgttacccaacctatgggtggtattgaattgaagttcatcgaaagagaaggttgggaaactagagttttggctaag

SEQ ID NO: 833 - protein, 505 aa, Lymantria dispar
MLSIYLPIFLIVAFYSLYYYFSRNFNYWKKKNVPGPKPTPFYGNLKQTALRKKNISVAFEEFYNAYPKEKYVGVYRMTTPCLLIRDLDIIKQIMIKDFDLFQDRGLEFSKSGLGQNLFHADGDTWSALRTRFTPVYTSGNLKNMFPLISSRANVFINHLVNKCKDPTELEMHGLVQKYTVSTIFACAFGVDIDYFHSDLDDGLKAVDKMVLTPTYANEFDMMYPGILRKLNVSIFPAKAIEFFENLVSNIITQRNGKPSGRGDFMDLVLQLRQKGEVQSTRGIEGTERKMLEITDDIIAGQAFVFYVGGYETSATTVAILMYYLATYPEVQEKIIEEVDRVTAEHGGEITYDCLQDMKYLEKAFKETLRINPIVDPLQRQAKVNYKVPGTDLVIEKGQVIFVSARGIQRDEKYYPKPEVFDPSRFDSEIEGARHSCAYLPFGTGPRNCIGMRFGIIQSRMGVAKILSKFRVEACSKTELKIEPNRVISGPENGIHVRLVPRKSSN

SEQ ID NO: 834 - DNA, 1515 bp, Lymantria dispar
  source 1..1515: mol_type = other DNA
atgctgtctatctacctgccaatcttcttgatcgttgctttctactccttgtactactacttctccagaaacttcaactactggaagaagaaaaacgttccaggtccaaaacctactccattttacggtaatttgaagcaaaccgccttgcgtaagaagaacatttctgttgctttcgaagaattctacaacgcttaccccaaagaaaagtatgttggtgtttacagaatgacgaccccatgcttgttgattagagatttggatatcatcaagcaaatcatgatcaaggacttcgacttgttccaagatagaggtttggaattctctaagtctggtttgggtcaaaatttgttccatgctgatggtgatacttggtctgctttgagaactaggtttactccagtttacacttccggtaacctgaagaatatgttcccattgatttcttccagagccaacgttttcattaaccacttggttaacaaatgcaaggacccaactgaattggaaatgcatggtttggtccaaaagtacaccgtttctactattttcgcttgtgctttcggtgttgatatcgattacttccactctgatttggatgatggtttgaaggctgttgataagatggttttgactccaacttacgccaacgaattcgatatgatgtatccaggtatcctgaggaagttgaacgtttcaatttttccagctaaggccatcgagtttttcgagaatttggtttccaacatcatcacccagagaaatggtaaaccatctggtagaggtgatttcatggatttggtattgcaattgagacagaagggtgaagttcaatctaccagaggtattgaaggtactgagaggaaaatgttggagatcaccgatgatattattgctggtcaagctttcgttttctacgttggtggttacgaaacttctgctactactgttgctatcctgatgtattacttggctacttacccagaagtccaagaaaagatcatcgaagaagttgatagagttaccgctgaacatggtggtgaaattacttatgattgcttgcaggacatgaagtacttggaaaaggctttcaaagaaaccttgaggatcaacccaatagttgacccattgcaaagacaagctaaggttaattacaaggttccaggtactgatttggtcatcgaaaagggtcaagttattttcgtttccgctagaggtattcaaagggacgaaaagtattacccaaagccagaagttttcgacccatctagattcgattctgaaattgaaggtgctagacattcttgtgcttacttgccatttggtactggtcctagaaactgtattggtatgagattcggtatcatccagtctagaatgggtgttgctaagatcttgtctaagttcagagttgaagcttgctctaagaccgaattgaagattgaacctaacagagttatctccggtccagaaaacggtattcatgttagattggttccccgtaagtcctctaat

SEQ ID NO: 835 - protein, 523 aa, Ostrinia furnacalis
MIVFISTFIVIALSLLYYVTTKNHNYWKKKNVVSCPNPKPIFGNYSDYILFKKFVGEVSQDICRALPNEPYIGTFYGSDPALLVQDPDILKIILTKDFYYFSSREVSQYTHKEVVTHQNLFFTYGDRWKVLRQNLTPIFTTAKMKLMFGLIVDCCRILEKSLDLDTKASDAIEVRALAAKYTIETIGSCGFGIETNSMLQSEQNPFIIIGNKIIDNSTIRGLVWNARVMWPSVFYGLGLKSFPAEVYKFFDTVSTKIFKARDYKPTARNDFIDCILNLKNNKYITGDSIRSVKDGDNKKIVMDVDNDMLVGLCMMFFTGGFETSSSTMSYTLYELAKNKEAQRRAQQEIDEYLKAHDNKLAYDCVTSLTYTEACVDEALRLYPVLAVLTREVVEDYTFPSGLTLEKNSRVHIPLYHLHHNPKYFPDPEAFKPERFLPENKQNIKPYTYMPFGDGPRICIGLRFAKMQTLAGLLTILKKYSVELADGTPEKLQFDPRAVVTTPIGGIPLKFTPRDGWEQRTFNK

SEQ ID NO: 836 - DNA, 1569 bp, Ostrinia furnacalis
  source 1..1569: mol_type = other DNA
atgatcgtgttcatctccaccttcatcgttattgctttgtccttgttgtactacgttactaccaagaaccataactactggaagaagaagaacgttgtctcttgtccaaatccaaagccaattttcggtaactactccgactacatcctgttcaaaaagttcgttggtgaagtctctcaagatatctgtagagctttgccaaacgaaccttacattggtactttttacggttctgatccagccttgttggttcaagatccagatattttgaagatcatcctgaccaaggacttctactacttctcatctagagaagtttctcagtacacccacaaagaagttgttacccatcaaaacttgttcttcacctatggtgatagatggaaggtcttgagacaaaacttgactccaattttcactaccgccaagatgaagttgatgttcggtttgatagttgactgctgcagaatcttggaaaagtccttagatttggataccaaggcttccgatgctattgaagttagagctttagctgctaagtacaccattgaaaccattggttcttgtggtttcggtatcgaaactaactctatgttgcaatccgaacagaacccattcattatcatcggtaacaagatcatcgacaactccactattagaggtttggtttggaatgctagagttatgtggccatctgttttttatggtttgggcttgaaatctttcccagccgaagtttacaagttcttcgatactgtttccaccaagattttcaaggccagagattataagccaaccgctagaaatgatttcatcgactgcattctgaacctgaaaaacaacaagtacattaccggtgactccatcagatctgttaaggatggtgataacaaaaagatcgttatggatgtcgacaacgatatgttggttggtttgtgtatgatgtttttcaccggtggttttgaaacctcttcttctactatgtcttacaccttgtacgaactggccaaaaacaaagaagctcaaagaagggctcaacaagaaatcgatgaatacttgaaggcccacgataacaaattggcctatgattgtgttacctctttgacttacactgaagcttgtgttgatgaagctttgaggttgtatccagttttggctgttttgacaagagaagtcgttgaggattacacttttccatctggtttgactttggagaagaactccagagttcatatcccattataccacttgcatcacaacccaaagtatttcccagatccagaagcttttaagccagaaagatttttgccagagaacaagcaaaacatcaagccatatacttacatgccatttggtgatggtccaagaatctgtattggtttgagattcgctaagatgcaaactttggctggtttgttgactatcctgaagaagtactctgttgaattggctgatggtactccagaaaagttgcaatttgatccaagagctgttgttactactccaattggtggtattccattgaagttcactccaagagatggttgggaacaaagaactttcaacaag

SEQ ID NO: 837 - protein, 634 aa, Eumeta variegata
MLERGDYVDTLRPAGAIQTVTENSFIKKLRASGRSLIVFYGSQTGTAEEFAGRLAKEGMRYKMKGMVADPEECEMEELTQLKEIPNSLAVFCMATYGEGDPTDNAMEFYDWLKSGEPDLTGLNYAVFGLGNKTYEHYNEVAVYLDKRLEELAATRVFELGLGDDDANIEDDFITWKDKLWPAVCEKFNIESTGEEELIRQFRLVTHSLDEIPKSNIFTGEIARLHSLENQRPPFDVKNPYLAEIKVNKELHKGGGRSCLHIEFDISGSKMRYEAGDHVAVYPTNNSELVTRLGELTNANLDEVFSLINTDTESTKKNPFPCPTSYRTALSHYVEITALPRTHILREMAEYCTDESDKQKLLLMSTNSQEGKALYQSFVVDACRNIVHILEDISSCRPPLDHICELLPRLQPRFYSISSSPKMYPDTVHVTAVVVQYETATGRVNRGVATTWLAAHRPLPGQSNPRVPLYIRKSQFKLPMQTSTPIVMVGPGTGLAPFRGFLQERASLRAEGHPVGDNVLYFGCRNRAHDYIYQEELEEYERNGDLQLHLAFSREQTQKVYVTHLLEQNSKQLWDILGNRNGHIYICGDAKNMAVDVRNIILKAIQEEGGRSETEAAQFLKKLESMKRYSADVWS

SEQ ID NO: 838 - DNA, 1902 bp, Eumeta variegata
  source 1..1902: mol_type = other DNA
atgttggaaagaggtgattacgttgatactttaagacctgctggtgctattcaaactgttaccgaaaactccttcatcaagaagttgagagcttctggtagatccttgatcgttttttacggttctcaaactggtactgctgaagaatttgctggtagattggctaaagaaggtatgaggtacaaaatgaagggtatggttgctgatcctgaagaatgtgaaatggaagaattgacccagttgaaagagatcccaaattctttggctgttttctgtatggctacttacggtgaaggtgatccaactgataatgctatggaattctacgactggttgaaatctggtgaacctgatttgactggtttgaactatgctgtttttggtttgggtaacaagacctacgaacactacaatgaagttgctgtttacttggacaagaggttagaagaattggctgctactagagttttcgaattaggtttgggtgatgatgatgccaacatcgaagatgatttcattacctggaaagacaaattgtggccagctgtttgtgaaaagttcaacattgaatctaccggtgaggaagagttgatcagacaattcagattggttacccattccttggacgaaattccaaagtctaacatcttcactggtgaaatcgctagattgcactccttggaaaatcaaagaccaccattcgatgttaagaacccatatttggctgaaatcaaggtcaacaaagaattgcacaaaggtggtggtagatcttgcttgcatattgaattcgatatctccggttccaagatgagatatgaagctggtgatcatgttgcagtttacccaactaacaactccgaattggttactagattgggtgaattgactaacgccaacttggatgaagttttctccttgattaacaccgataccgaatccactaagaaaaacccatttccatgtccaacctcttacagaactgctttgtctcactacgttgaaattactgctttgccaagaactcacatcttgagagaaatggctgaatactgtactgacgaatccgataagcaaaagctgttgttgatgtctaccaactctcaagaaggtaaagccttgtaccaatcctttgttgttgacgcttgtagaaacatcgtccatatcttggaagatatctcttcatgtagacctccattggatcatatttgtgagttgttgccaagattgcagccaagattctactccatttcttcatctccaaagatgtacccagataccgttcatgttactgcagttgttgttcaatacgaaactgctactggtagagttaatagaggtgttgctactacttggttggctgctcatagaccattgccaggtcaatctaatccaagagttcccttgtacattaggaagtcccaattcaaattgccaatgcaaacttctaccccaatcgttatggttggtccaggtactggtttggctccttttagaggttttttacaagaaagggcttccttgagagctgaaggtcatccagttggtgataatgtcttgtacttcggttgtagaaatagagcccatgactacatctatcaagaggaattggaagaatacgagagaaacggtgacttgcaattacatttggccttctcaagagaacaaacccaaaaggtttacgttacccacttgttggaacaaaactctaagcaattgtgggacattttgggtaatagaaacggtcacatctacatttgtggtgacgctaagaatatggccgttgatgttagaaacattatcttgaaggccatccaagaggaaggtggtaggtctgaaactgaagctgctcaatttttgaaaaagttggagtccatgaagaggtactctgctgatgtttggtct

SEQ ID NO: 839 - protein, 687 aa, Manduca sexta
MSENTQDVLKDAATGAAAAAAVGGSLFSTFDIVVLIILLGGTIWWLYNSKKENKKDEILLSKYSIQAAGSIQVTENSFINKLKSSGRSLVVFYGSQTGTAEEFAGRLAKEGMRYKMKGMVADPEECDMEELMKLQEIPNSLAVFCMATYGEGDPTDNSMEFYEWIKNGDPDLTGLNYAVFGLGNKTYEHYNAVAIYLDKRLEELGATRVFELGLGDDDANIEDDFITWKDKFWPAVCEKYNIESTGEEELIRQFRLVVHAPDEIPPNNVFTGEIARLHSLQVQRPPYDAKNPFLAQIKVNRELHHGGDRSCLHVELDISDSKMRYEAGDHVAIYPINDSNLVERLGNLTGSNLDEIFSLINTDQESTKKNPFPCPTSYRTALSHYIEITALPRTHILRELAEYCADEKDKQQLLLMATNSQEGKALYQSFVVDACRNIVHILEDLPSCKPPMDHICELLPRLQPRYYSISSSPKLHPETVHITAVVVQYKTPTGRVNKGVATTWLAQHKPEEGKPLPRVPVYIRKSQFRLPMQPQTPIIMVGPGTGLAPFRGFLQERAFVRANGKEVGDNILYFGCRHRDQDYIYKEELEEFEKNGDVQLKLAFSRDQAHKIYVTHLLEKDLDQLWDIIGNRNGHFYICGDAKNMAVDVRNIVLKAIQEKGGRTESEAVQFLKKLESMKKYSADVWS

SEQ ID NO: 840 - DNA, 2064 bp, Manduca sexta
  source 1..2064: mol_type = other DNA
atgtccgaaaacacccaggatgttttgaaagatgctgctactggtgctgctgctgcagctgctgttggtggttctttgttttctactttcgatatcgtcgtcctgatcatcttgttaggtggtactatttggtggctgtacaactccaaaaaagagaacaagaaggacgagatcctgctgtctaaatactctattcaagctgccggttccattcaagttactgaaaactctttcatcaacaagctgaagtcctctggtagatctttggttgttttttacggttctcaaaccggtactgctgaagaatttgctggtagattggctaaagaaggtatgaggtacaaaatgaagggtatggttgctgatcctgaagaatgtgatatggaagagttgatgaagttgcaagagatcccaaattcattggctgttttctgtatggctacttacggtgaaggtgatccaactgataatagcatggaattctacgagtggatcaagaatggtgatccagatttgactggtttgaactacgctgtttttggtttgggtaacaagacctacgaacattacaatgctgttgctatctacttggacaagaggttggaagaattgggtgctactagagttttcgaattaggtttgggtgatgatgatgccaacatcgaagatgatttcattacctggaaggataagttttggccagctgtttgtgaaaagtacaacattgaatctaccggcgaagaagaattgatcagacaattcagattggttgttcatgccccagacgaaattccaccaaacaatgtttttaccggtgaaatcgctagattgcactcattgcaagttcaaagaccaccatacgatgctaagaatccatttttggctcaaatcaaggtcaacagagaattgcatcatggtggtgatagatcttgcttgcatgttgaattggatatctccgactctaagatgagatatgaagctggtgatcatgttgcaatctacccaatcaatgattccaacttggttgaaaggttgggtaatttgaccggttctaatttggacgaaatcttctccttgatcaacaccgatcaagagtctactaagaagaacccttttccttgtccaacttcttacagaactgctttgtcccattacattgaaattaccgctttgccaagaacgcacatcttgagagaattggctgaatattgtgctgacgaaaaggataagcaacagttgttgttgatggctaccaattctcaagaaggtaaagccttgtaccaatcctttgttgtagatgcttgtagaaacatcgtccacatcttggaagatttgccatcttgtaaaccaccaatggatcatatttgtgagttgttgccaagattgcagccaaggtattactccatttcttcctctccaaaattgcacccagaaaccgttcatattactgctgttgttgttcagtacaagactccaactggtagagttaacaaaggtgttgctactacatggttggctcaacataagccagaagagggtaaaccattgccaagagttccagtttacattaggaagtctcagttcagattgccaatgcaaccacaaactccaattatcatggttggtccaggtactggtttggctccttttagaggttttttacaagaaagagctttcgtcagagccaacggtaaagaagtgggagataatatcttgtacttcggttgcagacacagagatcaagactacatctacaaagaagagttggaggaatttgagaagaacggtgatgtccaattgaagttggctttctctagggatcaagctcataagatctacgttacccatttgttggaaaaggacttggatcaattgtgggatatcatcggtaatagaaacggtcatttctacatttgcggtgacgctaagaatatggctgttgatgttagaaacattgtcttgaaggccatccaagaaaaaggtggtagaactgaatctgaagccgttcagtttttgaaaaagctggaatccatgaagaagtactctgctgacgtttggtcttga

SEQ ID NO: 841 - protein, 536 aa, Heliothis virescens
MNIFINLPRFFGQRRLLGSTIRKLRCVVFGLGNKTYEHYNAVAIYLDKRLEELGATRVYELGLGDDDANIEDDFITWKDKFWPAVCEKFNIESTGEEELIRQFRLVTHAPGDIQPNNVFTGEIARLHSLQVQRPPYDAKNPFLAQITVNRELHKGGDRSCIHVELDISDSKMRYEAGDHVAVYPINDSNLVERLGQLTGANLDEIFSLINTDQESSKKHPFPCPTSYRTALSHYVEITALPRTHILRELVEYCSDEEDKKKLMLMATNSQEGKALYQSFIVDACRNIVHILEDIPSCKPHLDHLCELLPRLQPRYYSISSSPKMYPETVHITAVIVKYKTPTGRVNKGVTTTWLAENKPEPGKPLPRVPVYIRKSQFRLPLQTQTPIIMVGPGTGLAPFRGFLQERAFARANGKEVGESILYFGCRHRDQDFIYQDELEKYEQNGDVKLNLAFSRDQKEKVYVTHLLEKDMDLLWDVIGNRNGHFYICGDAKNMAVDVRNIVLKAIQDKGGRTESEAVQFIKKLESMKKYSADVWS

SEQ ID NO: 842 - DNA, 1611 bp, Heliothis virescens
  source 1..1611: mol_type = other DNA
atgaacatcttcatcaacctgccaagattctttggtcaaagaagattattgggctccaccatcagaaagttgagatgtgttgtttttggtttgggcaacaagacctacgaacattacaatgctgttgctatctacttggacaagaggttggaagaattgggtgctactagagtttacgaattaggtttgggtgatgatgatgccaacatcgaagatgatttcattacctggaaggataagttttggccagctgtttgtgaaaagttcaacattgaatctaccggtgaggaagagttgatcagacaattcagattggttactcatgccccaggtgatattcaacctaacaatgttttcactggtgaaatcgccagattgcactctttacaagttcaaagaccaccatacgatgctaagaatccattcttggctcaaatcaccgttaacagggaattgcacaaaggtggtgatagatcttgcatccatgttgaattggatatctccgactctaagatgagatatgaagctggtgatcatgttgctgtttacccaatcaatgattccaacttggttgaaagattgggtcaactaactggtgctaatttggacgaaatcttctccttgattaacaccgaccaagagtcctctaagaaacatccatttccatgtccaacatcttacagaactgctttgtctcactacgttgaaattactgctttgccaagaactcacatcttgagagaattggttgaatactgctctgatgaagaggacaagaaaaagttgatgttgatggctaccaacagccaagaaggtaaagccttgtatcaatcctttatcgttgatgcctgtagaaacatcgtccacattttggaagatatcccatcttgtaagccacacttggatcatttgtgtgaattgctaccaagattgcaacctaggtactactccatttcttcctctccaaaaatgtacccagaaaccgttcatattaccgccgttatcgttaagtacaaaactccaactggtagagttaacaagggtgttactactacttggttggctgaaaacaaaccagaaccaggtaaaccattgccaagagttccagtttacattaggaagtctcagttcagattgccattgcaaactcaaaccccaattatcatggttggtccaggtactggtttggctccttttagaggttttttacaagaaagagctttcgctagagccaacggtaaagaagttggagaatctatcttgtacttcggttgcagacatagagatcaagactttatctaccaagacgagttggaaaagtacgaacaaaacggtgatgtgaagttgaacttggccttttccagagatcaaaaagaaaaggtttacgtcacccacttgttggagaaagatatggatttgttgtgggatgtcatcggtaatagaaacggtcatttctacatttgcggtgacgctaagaatatggctgttgatgttagaaacattgtcttgaaggctatccaagacaaaggcggtagaactgaatctgaagctgttcagttcatcaaaaagttggagtccatgaagaaatactccgctgatgtttggtcttaa

SEQ ID NO: 843 - protein, 502 aa, Helicoverpa armigera
MRKFQYWEKKKVPYIKPVPIFGNFSEYILQQKFIGEVVKEICQKFPNEPLIGAYYGTEPTLIVQDPELIKLVMTKDFYYFNGREVSDYSHRELFSRNLFATHGDQWKVLRQNLTPLFSSAKMKNMFHLIGKCSLVFEKVLDKETQKGDEIEVRALLAAYTMDCIGSCVFGVDTNVMEKKENNPFKNVGDVIFQSNKLRALKLVVRSIWPAIFFGLGFNTQPAEVKNFFTNLMTGIFSARQYTPTNRNDFVDLVLKLKNNKTMVGDSFNHMKGESAAKVTLDVDDELLIAQCFLFFAAGYETSATTLNYTLYELAKNPEAQEKALAEVDDYLRRNDNTLKYECVAETPYLEACTNEALRLYPVLAIPTREVMDDYTFPSGLKVEKGLRIHLPAYHLQRSPEYFPDPEKFQPERFLPENKQNIRQYTYFPFGDGPRVCIGIRFARMQMAAGLITLLKKYRVELAPGMKREVVFQPTSVVTQPIGGIRLKFVERENWEQRLLKSS

SEQ ID NO: 844 - DNA, 1509 bp, Helicoverpa armigera
  source 1..1509: mol_type = other DNA
atgagaaagtttcaatactgggaaaagaagaaggtcccttacattaagccagttccaattttcggtaacttctccgagtatatcttgcagcaaaagttcattggtgaagtcgtcaaagaaatctgccaaaagtttccaaacgaaccattgattggtgcttattacggtactgaacctaccttgatagttcaagatccagagttgatcaagctggttatgactaaggatttctactacttcaacggtagagaagtctccgattattctcatagagagttgttctccagaaacttgtttgctactcatggtgatcaatggaaggtcttgagacaaaatttgacccctttgttctcctcagctaagatgaagaatatgttccacttgatcggtaagtgctccttggtttttgaaaaggtgttggacaaagaaacccaaaagggtgacgaaattgaagttagagctttgttggctgcttacaccatggattgcattggttcttgtgtttttggtgttgataccaacgtcatggaaaagaaagaaaacaacccattcaagaacgttggtgacgttatcttccaatccaacaaattgagagccttgaagttggttgttagatctatttggccagccatttttttcggtttgggttttaatactcaaccagccgaagttaagaacttcttcactaatttgatgaccggtatcttctctgctagacagtatactccaactaacagaaacgatttcgttgacctggttctgaagttgaagaacaacaaaactatggtcggtgactccttcaatcatatgaagggtgaatctgctgctaaggttactttggatgttgatgatgagttgttgattgcccaatgctttttgttttttgctgctggttacgaaacttctgctactactttgaattacaccttgtacgagttggctaagaatccagaagctcaagaaaaagctttggccgaagttgatgattacttgagaagaaacgataacaccttgaagtacgaatgtgttgctgaaactccatacttggaagcttgtactaatgaagctttgaggttgtatccagttttggctattccaaccagagaagttatggatgattacacttttccatccggtttgaaggttgaaaagggtttgagaattcatttgccagcttaccacttgcaaagatccccagaatattttccagatccagaaaagttccagccagaaagatttttgccagaaaacaagcaaaacatcaggcagtacacttactttccatttggtgatggtccaagagtctgcattggtattagatttgctagaatgcaaatggctgccggtttgattactttgttgaagaagtacagagttgaattggctccaggtatgaagagagaagttgttttccaacctacttctgttgttacccaacctattggtggtatcagattgaagttcgtcgaaagagaaaattgggaacagaggttgttgaagtcctcttga

SEQ ID NO: 845 - skipped

SEQ ID NO: 846 - DNA, 1581 bp, Helicoverpa armigera
  source 1..1581: mol_type = other DNA
atggaagtagttactgtagcattgatagccgtcattatatcatctatattgtatttgttgttcggttcttctggaagaaagtttcaatactgggaaaagaagaaggtcccttacattaagccagttccaattttcggtaacttctccgagtatatcttgcagcaaaagttcattggtgaagtcgtcaaagaaatctgccaaaagtttccaaacgaaccattgattggtgcttattacggtactgaacctaccttgatagttcaagatccagagttgatcaagctggttatgactaaggatttctactacttcaacggtagagaagtctccgattattctcatagagagttgttctccagaaacttgtttgctactcatggtgatcaatggaaggtcttgagacaaaatttgacccctttgttctcctcagctaagatgaagaatatgttccacttgatcggtaagtgctccttggtttttgaaaaggtgttggacaaagaaacccaaaagggtgacgaaattgaagttagagctttgttggctgcttacaccatggattgcattggttcttgtgtttttggtgttgataccaacgtcatggaaaagaaagaaaacaacccattcaagaacgttggtgacgttatcttccaatccaacaaattgagagccttgaagttggttgttagatctatttggccagccatttttttcggtttgggttttaatactcaaccagccgaagttaagaacttcttcactaatttgatgaccggtatcttctctgctagacagtatactccaactaacagaaacgatttcgttgacctggttctgaagttgaagaacaacaaaactatggtcggtgactccttcaatcatatgaagggtgaatctgctgctaaggttactttggatgttgatgatgagttgttgattgcccaatgctttttgttttttgctgctggttacgaaacttctgctactactttgaattacaccttgtacgagttggctaagaatccagaagctcaagaaaaagctttggccgaagttgatgattacttgagaagaaacgataacaccttgaagtacgaatgtgttgctgaaactccatacttggaagcttgtactaatgaagctttgaggttgtatccagttttggctattccaaccagagaagttatggatgattacacttttccatccggtttgaaggttgaaaagggtttgagaattcatttgccagcttaccacttgcaaagatccccagaatattttccagatccagaaaagttccagccagaaagatttttgccagaaaacaagcaaaacatcaggcagtacacttactttccatttggtgatggtccaagagtctgcattggtattagatttgctagaatgcaaatggctgccggtttgattactttgttgaagaagtacagagttgaattggctccaggtatgaagagagaagttgttttccaacctacttctgttgttacccaacctattggtggtatcagattgaagttcgtcgaaagagaaaattgggaacagaggttgttgaagtcctcttga

SEQ ID NO: 847 - skipped

SEQ ID NO: 848 - DNA, 1572 bp, Helicoverpa armigera
  source 1..1572: mol_type = other DNA
atggaagagtccttgtgggttgttactgctacagttgttgttgttttcgctattgccaagctgttgagaaagtttcaatactgggaaaagaagaaggtcccttacattaagccagttccaattttcggtaacttctccgagtatatcttgcagcaaaagttcattggtgaagtcgtcaaagaaatctgccaaaagtttccaaacgaaccattgattggtgcttattacggtactgaacctaccttgatagttcaagatccagagttgatcaagctggttatgactaaggatttctactacttcaacggtagagaagtctccgattattctcatagagagttgttctccagaaacttgtttgctactcatggtgatcaatggaaggtcttgagacaaaatttgacccctttgttctcctcagctaagatgaagaatatgttccacttgatcggtaagtgctccttggtttttgaaaaggtgttggacaaagaaacccaaaagggtgacgaaattgaagttagagctttgttggctgcttacaccatggattgcattggttcttgtgtttttggtgttgataccaacgtcatggaaaagaaagaaaacaacccattcaagaacgttggtgacgttatcttccaatccaacaaattgagagccttgaagttggttgttagatctatttggccagccatttttttcggtttgggttttaatactcaaccagccgaagttaagaacttcttcactaatttgatgaccggtatcttctctgctagacagtatactccaactaacagaaacgatttcgttgacctggttctgaagttgaagaacaacaaaactatggtcggtgactccttcaatcatatgaagggtgaatctgctgctaaggttactttggatgttgatgatgagttgttgattgcccaatgctttttgttttttgctgctggttacgaaacttctgctactactttgaattacaccttgtacgagttggctaagaatccagaagctcaagaaaaagctttggccgaagttgatgattacttgagaagaaacgataacaccttgaagtacgaatgtgttgctgaaactccatacttggaagcttgtactaatgaagctttgaggttgtatccagttttggctattccaaccagagaagttatggatgattacacttttccatccggtttgaaggttgaaaagggtttgagaattcatttgccagcttaccacttgcaaagatccccagaatattttccagatccagaaaagttccagccagaaagatttttgccagaaaacaagcaaaacatcaggcagtacacttactttccatttggtgatggtccaagagtctgcattggtattagatttgctagaatgcaaatggctgccggtttgattactttgttgaagaagtacagagttgaattggctccaggtatgaagagagaagttgttttccaacctacttctgttgttacccaacctattggtggtatcagattgaagttcgtcgaaagagaaaattgggaacagaggttgttgaagtcctcttga

SEQ ID NO: 849 - protein, 502 aa, Helicoverpa armigera
MRKFQYWEKKKVPYIKPVPIFGNFSEYILQQKFIGEVVKEICQKFPNEPLIGAYYGTEPTLIVQDPELIKLVMTKDFYYFNGREVSDYSHRELFSRNLFATHGDQWKVLRQNLTPLFSSAKMKNMFHLIGKCSLVFEKVLDKETQKGDEIEVRALLAAYTMDCIGSCVFGVDTNVMEKKENNPFKNVGDVIFQSNKLRALKLVVRSIWPAIFFGLGFNTQPAEVKNFFTNLMTGIFSARQYTPTNRNDFVDLVLKLKNNKTMVGDSFNHMKGESAAKVTLDVDDELLIAQCFLFFAAGYETSATTLNYTLYELAKNPEAQEKALAEVDDYLRRNDNTLKYECVAETPYLEACTNEALRLYPVLAIPTREVMEDYTFPSGLKVEKGLRIHLPAYHLQRSPEYFPDPEKFQPERFLPENKQNIRQYTYFPFGDGPRVCIGIRFARMQMAAGLITLLKKYRVELAPGMKREVVFQPTSVVTQPIGGIRLKFVERENWEQRLLKSS

SEQ ID NO: 850 - DNA, 1509 bp, Helicoverpa armigera
  source 1..1509: mol_type = other DNA
atgagaaagtttcaatactgggaaaagaagaaggtcccttacattaagccagttccaattttcggtaacttctccgagtatatcttgcagcaaaagttcattggtgaagtcgtcaaagaaatctgccaaaagtttccaaacgaaccattgattggtgcttattacggtactgaacctaccttgatagttcaagatccagagttgatcaagctggttatgactaaggatttctactacttcaacggtagagaagtctccgattattctcatagagagttgttctccagaaacttgtttgctactcatggtgatcaatggaaggtcttgagacaaaatttgacccctttgttctcctcagctaagatgaagaatatgttccacttgatcggtaagtgctccttggtttttgaaaaggtgttggacaaagaaacccaaaagggtgacgaaattgaagttagagctttgttggctgcttacaccatggattgcattggttcttgtgtttttggtgttgataccaacgtcatggaaaagaaagaaaacaacccattcaagaacgttggtgacgttatcttccaatccaacaaattgagagccttgaagttggttgttagatctatttggccagccatttttttcggtttgggttttaatactcaaccagccgaagttaagaacttcttcactaatttgatgaccggtatcttctctgctagacagtatactccaactaacagaaacgatttcgttgacctggttctgaagttgaagaacaacaaaactatggtcggtgactccttcaatcatatgaagggtgaatctgctgctaaggttactttggatgttgatgatgagttgttgattgcccaatgctttttgttttttgctgctggttacgaaacttctgctactactttgaattacaccttgtacgagttggctaagaatccagaagctcaagaaaaagctttggccgaagttgatgattacttgagaagaaacgataacaccttgaagtacgaatgtgttgctgaaactccatacttggaagcttgtactaatgaagctttgaggttgtatccagttttggctattccaaccagagaagttatggaagattacacttttccatccggtttgaaggttgaaaagggtttgagaattcatttgccagcttaccacttgcaaagatccccagaatattttccagatccagaaaagttccagccagaaagatttttgccagaaaacaagcaaaacatcaggcagtacacttactttccatttggtgatggtccaagagtctgcattggtattagatttgctagaatgcaaatggctgccggtttgattactttgttgaagaagtacagagttgaattggctccaggtatgaagagagaagttgttttccaacctacttctgttgttacccaacctattggtggtatcagattgaagttcgtcgaaagagaaaattgggaacagaggttgttgaagtcctcttga

SEQ ID NO: 851 - skipped

SEQ ID NO: 852 - DNA, 1581 bp, Helicoverpa armigera
  source 1..1581: mol_type = other DNA
atggaagtagttactgtagcattgatagccgtcattatatcatctatattgtatttgttgttcggttcttctggaagaaagtttcaatactgggaaaagaagaaggtcccttacattaagccagttccaattttcggtaacttctccgagtatatcttgcagcaaaagttcattggtgaagtcgtcaaagaaatctgccaaaagtttccaaacgaaccattgattggtgcttattacggtactgaacctaccttgatagttcaagatccagagttgatcaagctggttatgactaaggatttctactacttcaacggtagagaagtctccgattattctcatagagagttgttctccagaaacttgtttgctactcatggtgatcaatggaaggtcttgagacaaaatttgacccctttgttctcctcagctaagatgaagaatatgttccacttgatcggtaagtgctccttggtttttgaaaaggtgttggacaaagaaacccaaaagggtgacgaaattgaagttagagctttgttggctgcttacaccatggattgcattggttcttgtgtttttggtgttgataccaacgtcatggaaaagaaagaaaacaacccattcaagaacgttggtgacgttatcttccaatccaacaaattgagagccttgaagttggttgttagatctatttggccagccatttttttcggtttgggttttaatactcaaccagccgaagttaagaacttcttcactaatttgatgaccggtatcttctctgctagacagtatactccaactaacagaaacgatttcgttgacctggttctgaagttgaagaacaacaaaactatggtcggtgactccttcaatcatatgaagggtgaatctgctgctaaggttactttggatgttgatgatgagttgttgattgcccaatgctttttgttttttgctgctggttacgaaacttctgctactactttgaattacaccttgtacgagttggctaagaatccagaagctcaagaaaaagctttggccgaagttgatgattacttgagaagaaacgataacaccttgaagtacgaatgtgttgctgaaactccatacttggaagcttgtactaatgaagctttgaggttgtatccagttttggctattccaaccagagaagttatggaagattacacttttccatccggtttgaaggttgaaaagggtttgagaattcatttgccagcttaccacttgcaaagatccccagaatattttccagatccagaaaagttccagccagaaagatttttgccagaaaacaagcaaaacatcaggcagtacacttactttccatttggtgatggtccaagagtctgcattggtattagatttgctagaatgcaaatggctgccggtttgattactttgttgaagaagtacagagttgaattggctccaggtatgaagagagaagttgttttccaacctacttctgttgttacccaacctattggtggtatcagattgaagttcgtcgaaagagaaaattgggaacagaggttgttgaagtcctcttga

SEQ ID NO: 853 - skipped

SEQ ID NO: 854 - DNA, 1572 bp, Helicoverpa armigera
  source 1..1572: mol_type = other DNA
atggaagagtccttgtgggttgttactgctacagttgttgttgttttcgctattgccaagctgttgagaaagtttcaatactgggaaaagaagaaggtcccttacattaagccagttccaattttcggtaacttctccgagtatatcttgcagcaaaagttcattggtgaagtcgtcaaagaaatctgccaaaagtttccaaacgaaccattgattggtgcttattacggtactgaacctaccttgatagttcaagatccagagttgatcaagctggttatgactaaggatttctactacttcaacggtagagaagtctccgattattctcatagagagttgttctccagaaacttgtttgctactcatggtgatcaatggaaggtcttgagacaaaatttgacccctttgttctcctcagctaagatgaagaatatgttccacttgatcggtaagtgctccttggtttttgaaaaggtgttggacaaagaaacccaaaagggtgacgaaattgaagttagagctttgttggctgcttacaccatggattgcattggttcttgtgtttttggtgttgataccaacgtcatggaaaagaaagaaaacaacccattcaagaacgttggtgacgttatcttccaatccaacaaattgagagccttgaagttggttgttagatctatttggccagccatttttttcggtttgggttttaatactcaaccagccgaagttaagaacttcttcactaatttgatgaccggtatcttctctgctagacagtatactccaactaacagaaacgatttcgttgacctggttctgaagttgaagaacaacaaaactatggtcggtgactccttcaatcatatgaagggtgaatctgctgctaaggttactttggatgttgatgatgagttgttgattgcccaatgctttttgttttttgctgctggttacgaaacttctgctactactttgaattacaccttgtacgagttggctaagaatccagaagctcaagaaaaagctttggccgaagttgatgattacttgagaagaaacgataacaccttgaagtacgaatgtgttgctgaaactccatacttggaagcttgtactaatgaagctttgaggttgtatccagttttggctattccaaccagagaagttatggaagattacacttttccatccggtttgaaggttgaaaagggtttgagaattcatttgccagcttaccacttgcaaagatccccagaatattttccagatccagaaaagttccagccagaaagatttttgccagaaaacaagcaaaacatcaggcagtacacttactttccatttggtgatggtccaagagtctgcattggtattagatttgctagaatgcaaatggctgccggtttgattactttgttgaagaagtacagagttgaattggctccaggtatgaagagagaagttgttttccaacctacttctgttgttacccaacctattggtggtatcagattgaagttcgtcgaaagagaaaattgggaacagaggttgttgaagtcctcttga

SEQ ID NO: 855 - protein, 502 aa, Helicoverpa armigera
MRKFQYWEKKKVPYIKPVPIFGNFSEYILQQKFIGEVVKEICQKFPNEPLIGAYYGTEPTLIVQDPELIKLVMTKDFYYFNGREVSDYSHRELFSRNLFATHGDQWKVLRQNLTPLFSSAKMKNMFHLIGKCSLVFEKVLDKETQKGDEIEVRALLAAYTMDCIGSCVFGVDTNVMEKKENNPFKNVGDVIFQSNKLRALKLVVRSIWPAIFFGLGFNTQPAEVKNFFTNLMTGIFSARQYTPTNRNDFVDLVLKLKNNKTMVGDSFNHMKGESAAKVTLDVDDELLIAQCFLFFGAGYETSATTLNYTLYELAKNPEAQEKALAEVDDYLRRNDNTLKYECVAETPYLEACTNEALRLYPVLAIPTREVMDDYTFPSGLKVEKGLRIHLPAYHLQRSPEYFPDPEKFQPERFLPENKQNIRQYTYFPFGDGPRVCIGIRFARMQMAAGLITLLKKYRVELAPGMKREVVFQPTSVVTQPIGGIRLKFVERENWEQRLLKSS

SEQ ID NO: 856 - DNA, 1509 bp, Helicoverpa armigera
  source 1..1509: mol_type = other DNA
atgagaaagtttcaatactgggaaaagaagaaggtcccttacattaagccagttccaattttcggtaacttctccgagtatatcttgcagcaaaagttcattggtgaagtcgtcaaagaaatctgccaaaagtttccaaacgaaccattgattggtgcttattacggtactgaacctaccttgatagttcaagatccagagttgatcaagctggttatgactaaggatttctactacttcaacggtagagaagtctccgattattctcatagagagttgttctccagaaacttgtttgctactcatggtgatcaatggaaggtcttgagacaaaatttgacccctttgttctcctcagctaagatgaagaatatgttccacttgatcggtaagtgctccttggtttttgaaaaggtgttggacaaagaaacccaaaagggtgacgaaattgaagttagagctttgttggctgcttacaccatggattgcattggttcttgtgtttttggtgttgataccaacgtcatggaaaagaaagaaaacaacccattcaagaacgttggtgacgttatcttccaatccaacaaattgagagccttgaagttggttgttagatctatttggccagccatttttttcggtttgggttttaatactcaaccagccgaagttaagaacttcttcactaatttgatgaccggtatcttctctgctagacagtatactccaactaacagaaacgatttcgttgacctggttctgaagttgaagaacaacaaaactatggtcggtgactccttcaatcatatgaagggtgaatctgctgctaaggttactttggatgttgatgatgagttgttgattgcccaatgctttttgttttttggtgctggttacgaaacttctgctactactttgaattacaccttgtacgagttggctaagaatccagaagctcaagaaaaagctttggccgaagttgatgattacttgagaagaaacgataacaccttgaagtacgaatgtgttgctgaaactccatacttggaagcttgtactaatgaagctttgaggttgtatccagttttggctattccaaccagagaagttatggatgattacacttttccatccggtttgaaggttgaaaagggtttgagaattcatttgccagcttaccacttgcaaagatccccagaatattttccagatccagaaaagttccagccagaaagatttttgccagaaaacaagcaaaacatcaggcagtacacttactttccatttggtgatggtccaagagtctgcattggtattagatttgctagaatgcaaatggctgccggtttgattactttgttgaagaagtacagagttgaattggctccaggtatgaagagagaagttgttttccaacctacttctgttgttacccaacctattggtggtatcagattgaagttcgtcgaaagagaaaattgggaacagaggttgttgaagtcctcttga

SEQ ID NO: 857 - skipped

SEQ ID NO: 858 - DNA, 1581 bp, Helicoverpa armigera
  source 1..1581: mol_type = other DNA
atggaagtagttactgtagcattgatagccgtcattatatcatctatattgtatttgttgttcggttcttctggaagaaagtttcaatactgggaaaagaagaaggtcccttacattaagccagttccaattttcggtaacttctccgagtatatcttgcagcaaaagttcattggtgaagtcgtcaaagaaatctgccaaaagtttccaaacgaaccattgattggtgcttattacggtactgaacctaccttgatagttcaagatccagagttgatcaagctggttatgactaaggatttctactacttcaacggtagagaagtctccgattattctcatagagagttgttctccagaaacttgtttgctactcatggtgatcaatggaaggtcttgagacaaaatttgacccctttgttctcctcagctaagatgaagaatatgttccacttgatcggtaagtgctccttggtttttgaaaaggtgttggacaaagaaacccaaaagggtgacgaaattgaagttagagctttgttggctgcttacaccatggattgcattggttcttgtgtttttggtgttgataccaacgtcatggaaaagaaagaaaacaacccattcaagaacgttggtgacgttatcttccaatccaacaaattgagagccttgaagttggttgttagatctatttggccagccatttttttcggtttgggttttaatactcaaccagccgaagttaagaacttcttcactaatttgatgaccggtatcttctctgctagacagtatactccaactaacagaaacgatttcgttgacctggttctgaagttgaagaacaacaaaactatggtcggtgactccttcaatcatatgaagggtgaatctgctgctaaggttactttggatgttgatgatgagttgttgattgcccaatgctttttgttttttggtgctggttacgaaacttctgctactactttgaattacaccttgtacgagttggctaagaatccagaagctcaagaaaaagctttggccgaagttgatgattacttgagaagaaacgataacaccttgaagtacgaatgtgttgctgaaactccatacttggaagcttgtactaatgaagctttgaggttgtatccagttttggctattccaaccagagaagttatggatgattacacttttccatccggtttgaaggttgaaaagggtttgagaattcatttgccagcttaccacttgcaaagatccccagaatattttccagatccagaaaagttccagccagaaagatttttgccagaaaacaagcaaaacatcaggcagtacacttactttccatttggtgatggtccaagagtctgcattggtattagatttgctagaatgcaaatggctgccggtttgattactttgttgaagaagtacagagttgaattggctccaggtatgaagagagaagttgttttccaacctacttctgttgttacccaacctattggtggtatcagattgaagttcgtcgaaagagaaaattgggaacagaggttgttgaagtcctcttga

SEQ ID NO: 859 - skipped

SEQ ID NO: 860 - DNA, 1572 bp, Helicoverpa armigera
  source 1..1572: mol_type = other DNA
atggaagagtccttgtgggttgttactgctacagttgttgttgttttcgctattgccaagctgttgagaaagtttcaatactgggaaaagaagaaggtcccttacattaagccagttccaattttcggtaacttctccgagtatatcttgcagcaaaagttcattggtgaagtcgtcaaagaaatctgccaaaagtttccaaacgaaccattgattggtgcttattacggtactgaacctaccttgatagttcaagatccagagttgatcaagctggttatgactaaggatttctactacttcaacggtagagaagtctccgattattctcatagagagttgttctccagaaacttgtttgctactcatggtgatcaatggaaggtcttgagacaaaatttgacccctttgttctcctcagctaagatgaagaatatgttccacttgatcggtaagtgctccttggtttttgaaaaggtgttggacaaagaaacccaaaagggtgacgaaattgaagttagagctttgttggctgcttacaccatggattgcattggttcttgtgtttttggtgttgataccaacgtcatggaaaagaaagaaaacaacccattcaagaacgttggtgacgttatcttccaatccaacaaattgagagccttgaagttggttgttagatctatttggccagccatttttttcggtttgggttttaatactcaaccagccgaagttaagaacttcttcactaatttgatgaccggtatcttctctgctagacagtatactccaactaacagaaacgatttcgttgacctggttctgaagttgaagaacaacaaaactatggtcggtgactccttcaatcatatgaagggtgaatctgctgctaaggttactttggatgttgatgatgagttgttgattgcccaatgctttttgttttttggtgctggttacgaaacttctgctactactttgaattacaccttgtacgagttggctaagaatccagaagctcaagaaaaagctttggccgaagttgatgattacttgagaagaaacgataacaccttgaagtacgaatgtgttgctgaaactccatacttggaagcttgtactaatgaagctttgaggttgtatccagttttggctattccaaccagagaagttatggatgattacacttttccatccggtttgaaggttgaaaagggtttgagaattcatttgccagcttaccacttgcaaagatccccagaatattttccagatccagaaaagttccagccagaaagatttttgccagaaaacaagcaaaacatcaggcagtacacttactttccatttggtgatggtccaagagtctgcattggtattagatttgctagaatgcaaatggctgccggtttgattactttgttgaagaagtacagagttgaattggctccaggtatgaagagagaagttgttttccaacctacttctgttgttacccaacctattggtggtatcagattgaagttcgtcgaaagagaaaattgggaacagaggttgttgaagtcctcttga

SEQ ID NO: 861 - protein, 498 aa, Heliothis virescens
MKKKFQYWEKRNVPHVPPVPLLGNFAKYILQKEFIGHTAQEICSKFPNEPVVGAYYATEPALMVQDPELIKLVVTKDFYFFNGHEISEFAHRERLGKNLFASYGDKWKVLRQNLTPIFTSSKMKNMFHLIEKCSHDFEDLLDKEARKDKEVEMRSLIARFTMDGIGNCAFGIHTHTMEQSENNPFTTIGNAFFFHNWYRSFQLVLRTIYPSIFYGLGYKFIHTEAEDFFTNMLTEIFKARDYTPTNRNDFVDLMLKFKTKKTMVGDSLQNIKTDDRKKVELQVDDDLLIAQCVLFFTAGFETSATTLSFTLYELAKHPEAQKRAIAEVDDYLQRHNNELKYECLSEMPFIEACFDETLRMYPAAGLLLREVIQDYTFPSGLKVEKGLRVFVPLYHLHHNPAFFPDPEEYRPERFLPENKHNIRPYTYMPFGDGPRICIGMRFAKMQMTAGIITVLKKYRLELAPGMKTKVEFTPNSIITQVKGGIKLNMIEREGWEQR

SEQ ID NO: 862 - DNA, 1497 bp, Heliothis virescens
  source 1..1497: mol_type = other DNA
atgaagaagaagtttcaatactgggagaagagaaacgttccacatgttccaccagttccattattgggtaatttcgctaagtacatcctgcagaaagaattcattggtcataccgctcaagaaatctgttctaagtttccaaacgaaccagttgttggtgcttattatgctactgaaccagctttgatggttcaagatccagaattgatcaagttggttgttaccaaggacttctactttttcaacggtcacgaaatttccgaattcgcccatagagaaagattgggtaagaatttgtttgcctcctatggtgataagtggaaggttttgagacaaaacttgaccccaattttcacctcctctaagatgaagaatatgttccacttgatcgagaagtgctcccatgattttgaagatttgttggacaaagaagcccgtaaggacaaagaggttgaaatgagatctttgattgccagattcaccatggatggtattggtaattgtgccttcggtattcatactcacactatggaacaatccgaaaacaacccattcactactattggtaacgctttcttcttccacaactggtacagatctttccaattggtcttgagaactatctacccctctattttctatggtttgggctacaagttcattcatactgaagctgaagatttcttcacgaacatgttgaccgaaattttcaaggctagagattacaccccaactaacagaaacgatttcgttgacctgatgttgaagttcaagactaagaaaactatggtcggtgactccttgcaaaacattaagactgatgataggaagaaggtcgaattgcaagttgatgatgatttgttgattgcccaatgcgttttgtttttcactgctggttttgaaacctctgctactactttgtctttcaccttgtacgaattggccaaacatccagaagctcaaaaaagagctattgccgaagttgacgattacttgcaaagacacaacaacgaattgaagtacgaatgcttgtctgagatgccattcattgaagcttgtttcgacgaaaccttgagaatgtatccagctgcaggtttgttgttgagagaagttattcaggattacactttcccatccggtttgaaagttgaaaagggtttgagagttttcgttcccttgtatcacttgcatcataatccagcatttttcccagatcctgaagagtatagaccagaaagatttctgccagaaaacaagcacaacattagaccatatacctacatgccatttggtgatggtccaagaatctgtattggtatgagattcgctaagatgcaaatgaccgctggtattattaccgtgttgaagaagtacagattggaattggctccaggtatgaaaactaaggttgaattcaccccaaactccattatcactcaagtaaaaggtggcatcaagctgaacatgattgaaagagaaggttgggaacagaggtga

SEQ ID NO: 863 - skipped

SEQ ID NO: 864 - DNA, 1569 bp, Heliothis virescens
  source 1..1569: mol_type = other DNA
atggaagtagttactgtagcattgatagccgtcattatatcatctatattgtatttgttgttcggttcttctggaaagaagaagtttcaatactgggagaagagaaacgttccacatgttccaccagttccattattgggtaatttcgctaagtacatcctgcagaaagaattcattggtcataccgctcaagaaatctgttctaagtttccaaacgaaccagttgttggtgcttattatgctactgaaccagctttgatggttcaagatccagaattgatcaagttggttgttaccaaggacttctactttttcaacggtcacgaaatttccgaattcgcccatagagaaagattgggtaagaatttgtttgcctcctatggtgataagtggaaggttttgagacaaaacttgaccccaattttcacctcctctaagatgaagaatatgttccacttgatcgagaagtgctcccatgattttgaagatttgttggacaaagaagcccgtaaggacaaagaggttgaaatgagatctttgattgccagattcaccatggatggtattggtaattgtgccttcggtattcatactcacactatggaacaatccgaaaacaacccattcactactattggtaacgctttcttcttccacaactggtacagatctttccaattggtcttgagaactatctacccctctattttctatggtttgggctacaagttcattcatactgaagctgaagatttcttcacgaacatgttgaccgaaattttcaaggctagagattacaccccaactaacagaaacgatttcgttgacctgatgttgaagttcaagactaagaaaactatggtcggtgactccttgcaaaacattaagactgatgataggaagaaggtcgaattgcaagttgatgatgatttgttgattgcccaatgcgttttgtttttcactgctggttttgaaacctctgctactactttgtctttcaccttgtacgaattggccaaacatccagaagctcaaaaaagagctattgccgaagttgacgattacttgcaaagacacaacaacgaattgaagtacgaatgcttgtctgagatgccattcattgaagcttgtttcgacgaaaccttgagaatgtatccagctgcaggtttgttgttgagagaagttattcaggattacactttcccatccggtttgaaagttgaaaagggtttgagagttttcgttcccttgtatcacttgcatcataatccagcatttttcccagatcctgaagagtatagaccagaaagatttctgccagaaaacaagcacaacattagaccatatacctacatgccatttggtgatggtccaagaatctgtattggtatgagattcgctaagatgcaaatgaccgctggtattattaccgtgttgaagaagtacagattggaattggctccaggtatgaaaactaaggttgaattcaccccaaactccattatcactcaagtaaaaggtggcatcaagctgaacatgattgaaagagaaggttgggaacagaggtga

SEQ ID NO: 865 - skipped

SEQ ID NO: 866 - DNA, 1560 bp, Heliothis virescens
  source 1..1560: mol_type = other DNA
atggaagagtccttgtgggttgttactgctacagttgttgttgttttcgctattgccaagctgttgaagaagaagtttcaatactgggagaagagaaacgttccacatgttccaccagttccattattgggtaatttcgctaagtacatcctgcagaaagaattcattggtcataccgctcaagaaatctgttctaagtttccaaacgaaccagttgttggtgcttattatgctactgaaccagctttgatggttcaagatccagaattgatcaagttggttgttaccaaggacttctactttttcaacggtcacgaaatttccgaattcgcccatagagaaagattgggtaagaatttgtttgcctcctatggtgataagtggaaggttttgagacaaaacttgaccccaattttcacctcctctaagatgaagaatatgttccacttgatcgagaagtgctcccatgattttgaagatttgttggacaaagaagcccgtaaggacaaagaggttgaaatgagatctttgattgccagattcaccatggatggtattggtaattgtgccttcggtattcatactcacactatggaacaatccgaaaacaacccattcactactattggtaacgctttcttcttccacaactggtacagatctttccaattggtcttgagaactatctacccctctattttctatggtttgggctacaagttcattcatactgaagctgaagatttcttcacgaacatgttgaccgaaattttcaaggctagagattacaccccaactaacagaaacgatttcgttgacctgatgttgaagttcaagactaagaaaactatggtcggtgactccttgcaaaacattaagactgatgataggaagaaggtcgaattgcaagttgatgatgatttgttgattgcccaatgcgttttgtttttcactgctggttttgaaacctctgctactactttgtctttcaccttgtacgaattggccaaacatccagaagctcaaaaaagagctattgccgaagttgacgattacttgcaaagacacaacaacgaattgaagtacgaatgcttgtctgagatgccattcattgaagcttgtttcgacgaaaccttgagaatgtatccagctgcaggtttgttgttgagagaagttattcaggattacactttcccatccggtttgaaagttgaaaagggtttgagagttttcgttcccttgtatcacttgcatcataatccagcatttttcccagatcctgaagagtatagaccagaaagatttctgccagaaaacaagcacaacattagaccatatacctacatgccatttggtgatggtccaagaatctgtattggtatgagattcgctaagatgcaaatgaccgctggtattattaccgtgttgaagaagtacagattggaattggctccaggtatgaaaactaaggttgaattcaccccaaactccattatcactcaagtaaaaggtggcatcaagctgaacatgattgaaagagaaggttgggaacagaggtga

SEQ ID NO: 867 - skipped

SEQ ID NO: 868 - DNA, 1473 bp, Eschscholzia californica
  source 1..1473: mol_type = other DNA
atggaagagtccttgtgggttgttactgctacagttgttgttgttttcgctattgccaagctgttgaagaagtcctcttctatttctactatggaatggccaaaaggcccaaagaagttgccaattattggtaacctacaccaattaggtggtgaagcttttcatgttgttttggccaatttggctaagatccatggtactgttatgaccatttgggttggtgcttggaggccaatgatagttatttccgatattgataaggcctgggaagtcttggttaacaagtcatctgattatgccggtagagatttcccagaaattaccaagattatttccgccaactggaagaacatttcctgttctgattctggtccattctggcaaaatttgagaaagggtttacaaggtggtgctttggctccattgaatgttatttctcaataccagttgcaagagcgtgacatgaagaacttgattacctctatgcaagaaaaggcctctaagaacaacggtattttgaagccattggactacttgaaagaagaaaccatcaggttgttgtccagattgattttcggtcaatctttcaacgacgagaacttcgttaagggtgttcatttggctttggatgatttggttagaatttccggttatgcttctttggctgatgctttcaagttctgtgaaaatttgccaagccacaagaagtccatcagagaagttcatgaagttaacgaaagagtcgtcaacttggttaagccatacttggtaaaaaacccaccaactaacacctacctgtactttttgaactcccaaaagttttccgacgaggttattatctctgccgttttggaagtttacgatttgggtgttgattctactgcttctacagctgtttgggctttgacttttttagtcagagaacctagagtccaagagaagttgtacaaagaaatcatcgatttgaccggtggtgaaagatctgttaaggttgaagatgtttccaagttgccttacttgcaagccgttatgaaagaaactatgaggatgaagccaattgctccaatggcaattccacataagacttctagagatacctctttgatgggtaagaaagtcaacaagggtacttccatcatggttaacttgtacgccattcatcataacccaaaggtttttccagaaccatacaagttcatcccagaaagattcttgcaaggtcaagaatctaagtacggcgacatcaaagaaatggaacaatctttgttgccattctccgctggtatgagaatttgtgcaggtatggaattgggtaaattgcagtacggtttttccttggcatctttggttgaagcctttaaatggacttgtgccgttgatggtaaactgccagatttgtctgaagatcattgcttcatcttgctgatgaagaatccattggaagctagaattactccaaggactcaactgtga

SEQ ID NO: 869 - skipped

SEQ ID NO: 870 - DNA, 1467 bp, Eschscholzia californica
  source 1..1467: mol_type = other DNA
atggaagtagttactgtagcattgatagccgtcattatatcatctatattgtatttgttgttcggttcttctggacacaaaaatctcccaccaggaccaaaaccatggccaatagtaggaaatcttctccaacttggtgagaaaccacacgctcaattcgccgaactagctcaaacctatggtgacattttcactcttaaaatgggtactgaaactgtagttgttgcatcaacatcttcggcagcttccgaaatactaaaaacccatgatcgaattctatccgctcgttacgtttttcaaagttttcgagtaaaagggcatgtagaaaattcaatagtttggtcagattgtactgaaacttggaagaatttaagaaaagtttgtaggacggaacttttcacacagaagatgatagaaagtcaagctcatgttagagagaaaaaatgtgaagaaatggttgaatacttgatgaaaaaacaaggggaagaagtgaaaattgtggaagtaatatttggaacattagtgaatatattcggaaatttgatattttcacagaatatatttgaattgggtganccaaatagtggaagttcagagttcaaggaatatctatggaggatgttggaattagggaattcaacaaatccagctgattattttccaatgttgggtaaatttgatttgtttggacagaggaaagaagttgcagagtgtttaaaagggatttatgctatttggggagctatgcttcaagaaaggaaattagctaaaaaagttgatggataccaaagcaagaatgattttgttgatgtttgtcttgattctggacttaatgattatcagatcaatgccttgcttatggaattatttggggcaggcacagaaacaagcgcatcgacaattgagtgggccatgactgaactaacaaagaatccaaagataacagctaagcttagatcagaacttcaaacagtggtaggcgagagatcggtaaaagaatccgacttccccaatcttccataccttgaagctactgttaaagaaaccctaagacttcacccaccaactccattgctactcccacgtcgagcacttgaaacctgtacaatcctcaactacaccatcccaaaagattgtcaaattatggtcaacgcttggggaatcggacgtgatcccaagacttggatcgatccgttgactttctcaccagagagattcttgaattctagtgttgactttagggggaatgatttcagtttgataccatttggtgcaggaagaaggatatgccccggtctgccaatagcaaatcagtttattgcattgctagtggcaacatttgtgcaaaatttggattggtgtctaccaaatgggatgagtgttgaccatttgatagtggaggagaagtttgggttgactcttcaaaaagaaccacctctattcattgttcctaaatcaagggtttga

SEQ ID NO: 871 - DNA, 4434 bp, Saccharomyces cerevisiae
  source 1..4434: mol_type = other DNA
atgacgattaccgtgggggatgcagtttcggagacggagctggaaaacaaaagtcaaaacgtggtactatctcccaaggcatctgcttcttcagacataagcacagatgttgataaggacacatcgtcttcttgggatgacaaatctttgctgcctacaggtgaatatattgtggacagaaataagccccaaacctacttgaatagcgatgatatcgaaaaagtgacagaatctgatattttccctcagaaacgtctgttttcattcttgcactctaagaaaattccagaagtaccacaaaccgatgacgagaggaagatatatcctctgttccatacaaatattatctctaacatgtttttttggtgggttctacccatcctgcgagttggttataagagaacgatacagccgaacgatctcttcaaaatggatccgaggatgtctatagagaccctttatgacgactttgaaaaaaacatgatttactattttgagaagacgaggaaaaaataccgtaaaagacatccagaagcgacagaagaagaggttatggaaaatgccaaactacctaaacatacagttctgagagctttattattcacttttaagaaacagtacttcatgtcgatagtgtttgcaattctcgctaattgtacatccggttttaaccccatgattaccaagaggctaattgagtttgtcgaagaaaaggctatttttcatagcatgcatgttaacaaaggtattggttacgctattggtgcatgtttgatgatgttcgttaacgggttgacgttcaaccatttctttcatacatcccaactgactggtgtgcaagctaagtctattcttactaaagctgccatgaagaaaatgtttaatgcatctaattatgcgagacattgttttcctaacggtaaagtgacttcttttgtaacaacagatctcgctagaattgaatttgccttatcttttcagccgtttttggctgggttccctgcaattttggctatttgcattgttttattgatcgttaaccttggacccattgccttagttgggattggtatttttttcggtgggtttttcatatccttatttgcatttaagttaattctgggctttagaattgctgcgaacatcttcactgatgctagagttaccatgatgagagaagtgctgaataatataaaaatgattaaatattatacgtgggaggatgcgtatgaaaaaaatattcaagatattaggaccaaagagatttctaaagttagaaaaatgcaactatcaagaaatttcttgattgctatggccatgtctttgcctagtattgcttcattggtcactttccttgcaatgtacaaagttaataaaggaggcaggcaacctggtaatatttttgcctctttatctttatttcaggtcttgagtttgcaaatgtttttcttacctattgctattggtactggaattgacatgatcattggattgggccgtttgcaaagcttattggaggctccagaagatgatccaaatcagatgattgaaatgaagccttctcctggctttgatccaaaattggctttaaaaatgacacattgctcatttgagtgggaagattatgaattaaacgacgctattgaagaagcaaaaggagaagctaaagatgaaggtaaaaagaacaaaaaaaagcgtaaggatacatggggtaagccatctgcaagtactaataaggcgaaaagattggacaatatgttgaaagacagagacggcccggaagatttagaaaaaacttcgtttaggggtttcaaggacttgaacttcgatattaaaaagggcgaatttattatgattacgggacctattggtactggtaaatcttcattattgaatgcgatggcaggatcaatgagaaaaactgatggtaaggttgaagtcaacggggacttattaatgtgtggttatccatggattcaaaatgcatctgtaagagataacatcatattcggttcaccattcaataaagaaaagtatgatgaagtagttcgtgtttgctctttgaaagctgatctggatattttaccggcaggcgatatgaccgaaattggggaacgtggtattactttatctggtggtcaaaaggcacgtatcaatttagccaggtctgtttataagaagaaggatatttatctattcgacgatgtcctaagtgctgtcgattctcgtgttggtaaacacatcatggatgaatgtctaaccggaatgcttgctaataaaaccagaattttagcaacgcatcaattgtcactgattgagagagcttctagagtcatcgttttaggtactgatggccaagtcgatattggtactgttgatgagctaaaagctcgtaatcaaactttgataaatcttttacaattctcttctcaaaattcggagaaagaggatgaagaacaggaagcggttgttgccggtgaattgggacaactaaaatatgaatcagaggtaaaggaattgactgaactgaagaaaaaggctacagaaatgtcacaaactgcaaatagtggtaaaattgtagcggatggtcatactagtagtaaagaagaaagagcagtcaatagtatcagtctgaaaatataccgtgaatacattaaagctgcagtaggtaagtggggttttatcgcactaccgttgtatgcaattttagtcgttggaaccacattctgctcacttttttcttccgtttggttatcttactggactgagaataaattcaaaaacagaccacccagtttttatatgggtctttactccttctttgtgtttgctgctttcatattcatgaatggccagttcaccatactttgcgcaatgggtattatggcatcgaaatggttaaatttgagggctgtgaaaagaattttacacactccaatgtcatacatagataccacacctttgggacgtattctgaacagattcacaaaagatacagatagcttagataatgagttaaccgaaagtttacggttgatgacatctcaatttgctaatattgtaggtgtttgcgtcatgtgtattgtttacttgccgtggtttgctatcgcaattccgtttcttttggtcatctttgttctgattgctgatcattatcagagttctggtagagaaattaaaagacttgaagctgtgcaacggtcttttgtttacaataatttaaatgaagttttgggtgggatggatacaatcaaagcataccgaagtcaggaacgatttttggcgaaatcagattttttgatcaacaagatgaatgaggcgggataccttgtagttgtcctgcaaagatgggtaggtattttccttgatatggttgctatcgcatttgcactaattattacgttattgtgtgttacgagagcctttcctatttccgcggcttcagttggtgttttgttgacttatgtattacaattgcctggtctattaaataccattttaagggcaatgactcaaacagagaatgacatgaatagtgccgaaagattggtaacatatgcaactgaactaccactagaggcatcctatagaaagcccgaaatgacacctccagagtcatggccctcaatgggcgaaataatttttgaaaatgttgattttgcctatagacctggtttacctatagttttaaaaaatcttaacttgaatatcaagagtggggaaaaaattggtatctgtggtcgtacaggtgctggtaagtccactattatgagtgccctttacaggttgaatgaattgaccgcaggtaaaattttaattgacaatgttgatataagtcagctgggacttttcgatttaagaagaaaattagccatcattccacaagatccagtattatttaggggtacgattcgcaagaacttagatccatttaatgagcgtacagatgacgaattatgggatgcattggtgagaggtggtgctatcgccaaggatgacttgccggaagtgaaattgcaaaaacctgatgaaaatggtactcatggtaaaatgcataagttccatttagatcaagcagtggaagaagagggctccaatttctccttaggtgagagacaactattagcattaacaagggcattggtccgccaatcaaaaatattgattttggatgaggctacatcctcagtggactacgaaacggatggcaaaatccaaacacgtattgttgaggaatttggagattgtacaattttgtgtattgctcacagactgaagaccattgtaaattatgatcgtattcttgttttagagaagggtgaagtcgcagaattcgatacaccatggacgttgtttagtcaagaagatagtattttcagaagcatgtgttctagatctggtattgtggaaaatgatttcgagaacagaagttaa

SEQ ID NO: 872 - protein, 1477 aa, Saccharomyces cerevisiae
MTITVGDAVSETELENKSQNVVLSPKASASSDISTDVDKDTSSSWDDKSLLPTGEYIVDRNKPQTYLNSDDIEKVTESDIFPQKRLFSFLHSKKIPEVPQTDDERKIYPLFHTNIISNMFFWWVLPILRVGYKRTIQPNDLFKMDPRMSIETLYDDFEKNMIYYFEKTRKKYRKRHPEATEEEVMENAKLPKHTVLRALLFTFKKQYFMSIVFAILANCTSGFNPMITKRLIEFVEEKAIFHSMHVNKGIGYAIGACLMMFVNGLTFNHFFHTSQLTGVQAKSILTKAAMKKMFNASNYARHCFPNGKVTSFVTTDLARIEFALSFQPFLAGFPAILAICIVLLIVNLGPIALVGIGIFFGGFFISLFAFKLILGFRIAANIFTDARVTMMREVLNNIKMIKYYTWEDAYEKNIQDIRTKEISKVRKMQLSRNFLIAMAMSLPSIASLVTFLAMYKVNKGGRQPGNIFASLSLFQVLSLQMFFLPIAIGTGIDMIIGLGRLQSLLEAPEDDPNQMIEMKPSPGFDPKLALKMTHCSFEWEDYELNDAIEEAKGEAKDEGKKNKKKRKDTWGKPSASTNKAKRLDNMLKDRDGPEDLEKTSFRGFKDLNFDIKKGEFIMITGPIGTGKSSLLNAMAGSMRKTDGKVEVNGDLLMCGYPWIQNASVRDNIIFGSPFNKEKYDEVVRVCSLKADLDILPAGDMTEIGERGITLSGGQKARINLARSVYKKKDIYLFDDVLSAVDSRVGKHIMDECLTGMLANKTRILATHQLSLIERASRVIVLGTDGQVDIGTVDELKARNQTLINLLQFSSQNSEKEDEEQEAVVAGELGQLKYESEVKELTELKKKATEMSQTANSGKIVADGHTSSKEERAVNSISLKIYREYIKAAVGKWGFIALPLYAILVVGTTFCSLFSSVWLSYWTENKFKNRPPSFYMGLYSFFVFAAFIFMNGQFTILCAMGIMASKWLNLRAVKRILHTPMSYIDTTPLGRILNRFTKDTDSLDNELTESLRLMTSQFANIVGVCVMCIVYLPWFAIAIPFLLVIFVLIADHYQSSGREIKRLEAVQRSFVYNNLNEVLGGMDTIKAYRSQERFLAKSDFLINKMNEAGYLVVVLQRWVGIFLDMVAIAFALIITLLCVTRAFPISAASVGVLLTYVLQLPGLLNTILRAMTQTENDMNSAERLVTYATELPLEASYRKPEMTPPESWPSMGEIIFENVDFAYRPGLPIVLKNLNLNIKSGEKIGICGRTGAGKSTIMSALYRLNELTAGKILIDNVDISQLGLFDLRRKLAIIPQDPVLFRGTIRKNLDPFNERTDDELWDALVRGGAIAKDDLPEVKLQKPDENGTHGKMHKFHLDQAVEEEGSNFSLGERQLLALTRALVRQSKILILDEATSSVDYETDGKIQTRIVEEFGDCTILCIAHRLKTIVNYDRILVLEKGEVAEFDTPWTLFSQEDSIFRSMCSRSGIVENDFENRS

SEQ ID NO: 873 - DNA, 1083 bp, Papaver somniferum
  source 1..1083: mol_type = other DNA
atggaaacgcccatcctgatcaagttaggtaatggtttgtctatcccatccgttcaagaattggctaaattgaccttggctgaaatcccatctagatacacttgtactggtgaatctcccttgaacaatattggtgcttctgttactgatgacgaaaccgttccagttattgacttgcaaaatttgttgtccccagaaccagttgtcggtaaattggaattggataagttgcattccgcttgtaaagaatggggtttcttccaattggttaatcatggtgttgatgccttgttgatggacaacattaagtctgaaatcaagggcttcttcaacttgccaatgaacgaaaagactaagtacggtcaacaagatggtgattttgaaggtttcggtcaaccttacatcgaatccgaagatcaaagattggattggaccgaagttttctccatgttgtctttgccattgcatttgagaaagccacatttgtttccagaattgcctttgcctttcagagaaaccttggaatcttacctgtctaagatgaagaagttgtccaccgttgttttcgaaatgttggaaaagtccttgcagttggtcgaaatcaaaggtatgactgacttgtttgaagatggcttgcaaaccatgagaatgaattattacccaccatgtccaagaccagaattggttttgggtttgacttctcactctgatttctctggtttgaccattttgttgcagttgaatgaagttgaaggcctgcagatcagaaaagaagaacgttggatttccattaagccattgccagatgctttcatcgttaacgttggtgatatcttggaaatcatgaccaacggtatctacaggtctgttgaacatagagctgttgtcaactctaccaaagaaagattgtctattgccaccttccacgactctaagttggaatctgaaattggtccaatctcctcattggttactccagaaactccagctttgtttaagagaggtagatacgaggacatcctgaaagaaaacttgtccagaaagttggatggcaagtctttcttggactacatgaggatgtaa

SEQ ID NO: 874 - protein, 360 aa, Papaver somniferum
METPILIKLGNGLSIPSVQELAKLTLAEIPSRYTCTGESPLNNIGASVTDDETVPVIDLQNLLSPEPVVGKLELDKLHSACKEWGFFQLVNHGVDALLMDNIKSEIKGFFNLPMNEKTKYGQQDGDFEGFGQPYIESEDQRLDWTEVFSMLSLPLHLRKPHLFPELPLPFRETLESYLSKMKKLSTVVFEMLEKSLQLVEIKGMTDLFEDGLQTMRMNYYPPCPRPELVLGLTSHSDFSGLTILLQLNEVEGLQIRKEERWISIKPLPDAFIVNVGDILEIMTNGIYRSVEHRAVVNSTKERLSIATFHDSKLESEIGPISSLVTPETPALFKRGRYEDILKENLSRKLDGKSFLDYMRM

SEQ ID NO: 875 - DNA, 1557 bp, Artificial
  source 1..1557: mol_type = other DNA
atgatcaccaccttgctgctgttttctttgttcgttttgattaccgccttgtacttcgtcttgaagaagaagtttcaatactgggagaagagaaacgttccacatgttccaccagttccattattgggtaatttcgctaagtacatcctgcagaaagaattcattggtcataccgctcaagaaatctgttctaagtttccaaacgaaccagttgttggtgcttattatgctactgaaccagctttgatggttcaagatccagaattgatcaagttggttgttaccaaggacttctactttttcaacggtcacgaaatctccgaattcaaccatagagaaagattgggcaagaacttgtttgcttcttatggtgataagtggaaggtcttgagacaaaacttgactccaattttcacctcctccaagatgaagaatatgttccacttgatcgaaaagtgctcccacgattttgaagatttgttggacaaagaagcccgtaaggacaaagaggttgaaatgagatctttgattgccagattcaccatggatggtattggtaattgtgccttcggtattcatactcacactatggaacaatccgaaaacaacccattcactactattggtaacgctttcttcttccacaactggtacagatccttccaattgattttgaggactatctacccctccattttttacggtttgggttacaagttcattccaactgaagctgaagatttcttcacgaacatgttgaccgaaattttcaaggctagagattacaccccaactaacagaaacgatttcgttgacctgatgttgaagttcaagaccaaaaagactatggtcggtgactcattgcaaaacattaagaccgatgataggaagaaggtcgaattgcaagttgatgatgatttgttgattgcccaatgcgttttgtttttcactgctggttttgaaacctctgctactactttgtctttcaccttgtacgaattggccaaacatccagaagctcaaaaaagagctattgccgaagttgacgattacttgcaaagacacaacaacgaattgaagtacgaatgcttgtctgagatgccattcattgaagcttgtttcgacgaaaccttgagaatgtatccagctgcaggtttgttgttgagagaagttattcaagactacactttcccatccggtttgaaagttgaaaagggtttgagagttttcgttcccttgtatcacttgcatcataatccagcatttttcccagatcctgaagagtatagaccagaaagatttctgccagaaaacaagcacaacattagaccatatacctacatgccatttggtgatggtccaagaatctgtattggtatgagattcgctaagatgcaaatgaccgctggtattattaccgtgttgaagaagtacagattggaattggctccaggtatgaaaactaaggttgagtttaccccaaactccattatcactcaagtaaaaggtggcatcaagctgaacatgattgaaagagaaggttgggaacagaggtga

SEQ ID NO: 876 - protein, 518 aa, Artificial; identical to SEQ ID NO: 772

SEQ ID NO: 877 - DNA, 1410 bp, Castanea mollissima
  source 1..1410: mol_type = other DNA
atggaacagaagccacatattgccttgttgccatctccaggtatgggtcatttgattccattggttgaattcgctaagttgttcgtcttgcatcacgatttcagaattacctgcattatcccagttttgggttctccatctaaagctatgaaggctgttttacaagctttgccaactaccatcgatcatgtttttttgccaccagtcatcttggaagaagaagaaatcaagggtttgaagttcgaagtccaaaccattttgactttgaccagatctttaccaccattgagagatgttttgaagtccactagattctccgcttttgttgttgatccattcggtattgatgctctggatattgccaaagagttgaagatctctccttacatctttttcccaactaacgccttcgttctgtctttgatgtttcatttgccaaagttggacgaaaccgtttcttgtgagtatagagatttgccagaaccattgaaattgccaggttgcattccaattcatggtagagacttgattgaaccagttcaggatagaacttctgagctgtacaagatgtttttgagaaacgtcaagagattcagattggccgaaggtattatcgttaacaccttcatggaattggaaggttctgctattaaggccttgttggatgaagaagctaagaacttgccattatacccaattggtccaatccaatctggttcctctaacttacaagttgacaagtctgaatccgattgcttgagatggttggataatcaacctagaggttccgttttgttcgtttgttttggttctggtggtactttgtcctacgatcaaactaacgaattggccttgggtttagaattgtccggtcaaaagtttttgtgggttgttagaactccagataacgaatctgctgatgctgcttatttgtctgatcaaaccttggacaacaatcctttggcttttttgcctaagggtttcgttgaaagaactgaaggtcaaggtttggctgttccatcttgggctccacaagctcaagttttgtctcatggttctactggtggtttcttgactcattgtggttggaattctaccttggaatccattatgcaaggtattccattgattgcttggccattatatgccgaacaaaagatgaatgctcctttgttggcagaagatttgaaagttgctttgaggccaaagactaacaagaatggtttgattgacagggaagaaatcgccaaggttgttaagggtttaatggtcggtgaagaaggtaaaaaggttcacaacagaatgaaggatattaagattgctgctgagaaggctttgtcagctgatggttcttctactaagactttgtctgaattggcttcccaatggaaaaatcatccaggtttctga

SEQ ID NO: 878 - protein, 469 aa, Castanea mollissima
MEQKPHIALLPSPGMGHLIPLVEFAKLFVLHHDFRITCIIPVLGSPSKAMKAVLQALPTTIDHVFLPPVILEEEEIKGLKFEVQTILTLTRSLPPLRDVLKSTRFSAFVVDPFGIDALDIAKELKISPYIFFPTNAFVLSLMFHLPKLDETVSCEYRDLPEPLKLPGCIPIHGRDLIEPVQDRTSELYKMFLRNVKRFRLAEGIIVNTFMELEGSAIKALLDEEAKNLPLYPIGPIQSGSSNLQVDKSESDCLRWLDNQPRGSVLFVCFGSGGTLSYDQTNELALGLELSGQKFLWVVRTPDNESADAAYLSDQTLDNNPLAFLPKGFVERTEGQGLAVPSWAPQAQVLSHGSTGGFLTHCGWNSTLESIMQGIPLIAWPLYAEQKMNAPLLAEDLKVALRPKTNKNGLIDREEIAKVVKGLMVGEEGKKVHNRMKDIKIAAEKALSADGSSTKTLSELASQWKNHPGF

SEQ ID NO: 879 - DNA, 1410 bp, Quercus suber
  source 1..1410: mol_type = other DNA
atggaacagaagccacatattgccttgttgccatctccaggtatgggtcatttgattccattggttgaattcgctaagcaattcgtcttgcatcatgatttccatattacctgcatcatcccagttttgggttctccatctaaagctatgaaggctgttttacaagctttgccaactaccatcgatcatgtttttttgccaccagtcatcttggaagaagaagaaatcaagggtttgaagttcgaagtccaaaccattttgactttgaccagatctttaccaccattgagggaagttttgaaaaccactagattctccgctttcgttgttgatccatttggtattgatgctctggatatcgccaaagagttgaacatttctccctacattttcttcccatctaacgcttttgccctgtccttgatttttcatttgccaaagttggacgaaaccgtttcttgtgagtatagagatttgccagaaccattgaaattgccaggttgcattccaattcatggtagagacttgattgaaccagttcaagatagaacctctgagctgtacaagatgtttttgagaaacgccaagagattcagattggccgaaggtattatcgttaacaccttcatggaattggaaggttctgctattaaggccttgttggatgaagaagctaagaacttgccattatacccaattggtccaatccaatctggttcctctaacttacaagttgacaagtctgtttccgattgcttgagatggttggataatcaaccacatggttccgttttgttcgtttgttttggttctggtggtactttgtcctacgatcaaactaacgaattggccttgggtttagaattgtccggtcaaaagtttttgtgggttgttagaactccaaacaacgaatctgctgatgctgcttatttgtccgatcaaatcttggacaacaaccccttggattttttgcctaagggtttcgttgaaagaactgaaggtcaaggtttggctgttccatcttgggctccacaagctcaagttttgtctcatggttctactggtggtttcttgactcattgtggttggaattctaccttggaatccattatgcaaggtattccattgattgcttggccattatatgccgaacaaaagatgaatgctcctttgttggcagaagatttgaaagttgctttgaggccaaagactaacaagtccggtttgattgatcaagaagagattgccaaggttgttaagggtttaatgattggtgaagagggcaaaaaggtctacaatagaatgaaggatattaagatggctgccgagaaagctttgtcagctgatggttcttctactaaggctttatctgaattggcttcccaatggaaaaatcacccaggtttctaa

SEQ ID NO: 880 - protein, 469 aa, Quercus suber
MEQKPHIALLPSPGMGHLIPLVEFAKQFVLHHDFHITCIIPVLGSPSKAMKAVLQALPTTIDHVFLPPVILEEEEIKGLKFEVQTILTLTRSLPPLREVLKTTRFSAFVVDPFGIDALDIAKELNISPYIFFPSNAFALSLIFHLPKLDETVSCEYRDLPEPLKLPGCIPIHGRDLIEPVQDRTSELYKMFLRNAKRFRLAEGIIVNTFMELEGSAIKALLDEEAKNLPLYPIGPIQSGSSNLQVDKSVSDCLRWLDNQPHGSVLFVCFGSGGTLSYDQTNELALGLELSGQKFLWVVRTPNNESADAAYLSDQILDNNPLDFLPKGFVERTEGQGLAVPSWAPQAQVLSHGSTGGFLTHCGWNSTLESIMQGIPLIAWPLYAEQKMNAPLLAEDLKVALRPKTNKSGLIDQEEIAKVVKGLMIGEEGKKVYNRMKDIKMAAEKALSADGSSTKALSELASQWKNHPGF

SEQ ID NO: 881 - DNA, 1419 bp, Quercus suber
  source 1..1419: mol_type = other DNA
atgctgtccaagatggaacagaagccacatattgctttgttgccatctttaggtatgggtcatttgatcccattggttgaatttgctaagcaattcgtcttgcatcacgatttccatattacctgcattatcccagttttgggttctccatctaaagctatgaaggctgttttacaagctttgccaactgccattgatcatgtttttttgccaccagtcaagttggaagaagaagaaatcaagggtttgaagttcgaagtccaaaccattttgactttgaccagatctttaccaccattgagagaagttttgaagtccactagattctccgcttttgttgttgatccattcggtattgatgctctggatattgccaaagagttgaacatctctccctacatttttttcccaactaacgctttcgccctgtccttgatttttcatttgccaaaattggacgagactgtctcttgtgagtatagagatttgccagaaccattgaaattgccaggttgcattccaattcatggtagagacttgttggaaccagttcaagatagaacttctgagctgtacaagatgttcttgagaaacgctaagagattcagattggccgaaggtattatcgttaacaccttcatggaattggaaggttctgctattaaggccttgttagatgaagaagctaagaacttgccactgtatccaattggtccaattcaatccggttcctctaatcaagttgacaagtctgaatctgattgcttgagatggttggataatcaaccacatggttccgttttgttcgtttgttttggttctggtggtactttgtcctacgatcaaactaacgaattggccttgggtttagaattgtccggtcaaaagtttttgtgggttgttagaactccaaacaacgaatctgctgatgctgcttatttgtctgatcaaaccttgaacaacaacctgttggcttttttgcctaagggtttcgttgaaagaactgaaggtcaaggtttagctgttccttcatgggctccacaagctcaagttttgtctcatggttctactggtggtttcttgactcattgtggttggaattctaccttggaatccattatgcaaggtattccattgattgcctggccattatacgctgaacaaaaaatgaatgctcctttgttggctgaggatttgaaggttgctttaagaccaaagactaacaagaacggtttgattgacagagaagagattgccaaggttgttaagggtttaatgattggtgaagagggcaaaaaggtctacaatagaatgaaggatattaagatggctgccgagaaagctttgtcagctgatggttcttctactaaggctttatctgaattggcttcccaatggaaaaatcacccaggtttctaa

SEQ ID NO: 882 - protein, 472 aa, Quercus suber
MLSKMEQKPHIALLPSLGMGHLIPLVEFAKQFVLHHDFHITCIIPVLGSPSKAMKAVLQALPTAIDHVFLPPVKLEEEEIKGLKFEVQTILTLTRSLPPLREVLKSTRFSAFVVDPFGIDALDIAKELNISPYIFFPTNAFALSLIFHLPKLDETVSCEYRDLPEPLKLPGCIPIHGRDLLEPVQDRTSELYKMFLRNAKRFRLAEGIIVNTFMELEGSAIKALLDEEAKNLPLYPIGPIQSGSSNQVDKSESDCLRWLDNQPHGSVLFVCFGSGGTLSYDQTNELALGLELSGQKFLWVVRTPNNESADAAYLSDQTLNNNLLAFLPKGFVERTEGQGLAVPSWAPQAQVLSHGSTGGFLTHCGWNSTLESIMQGIPLIAWPLYAEQKMNAPLLAEDLKVALRPKTNKNGLIDREEIAKVVKGLMIGEEGKKVYNRMKDIKMAAEKALSADGSSTKALSELASQWKNHPGF

SEQ ID NO: 883 - DNA, 1407 bp, Quercus suber
  source 1..1407: mol_type = other DNA
atggaacagaagccacatattgccttgttgccatctccaggtatgggtcatttgattccattggttgaattcgctaagcaattcgtcttgcatcacgatttcagaattacctgtatcgttccagttttgggttctccatctaaagctatgaaggctgttttacaagctttgccaactaccatcgatcatgtttttttgccaccagtcaagttggaagaagaagaaattagaggtttgaagttcgaagtccaaaccattttgactttgaccagatctttaccaccattgagagaagttttgaagtccactagattctccgcttttgttgttgatccattcggtattgatgctctggatattgccaaagagttgaacatctctccctacatttttttcccaactaacgctttcgccctgtccttgatttttcatttgccaaagttggacaagaccgtttcttgtgagtatagagatttgccagaaccattgaaattgccaggttgcattccaattcatggtagagacttgtctgaaccagttcaagatagaacttctgagctgtacaagatgttcttgagaaacgctaagagattcagattggccgaaggtattatcgttaacaccttcatggaattggaaaggtctgctattaaggccttgttagatgaagaagctaagaacttgccactgtatccaattggtccaattcaatccggttcctctaatcaagttgacaagtctgaatctgattgcttgaggtggttggaaaatcaaccacatggttctgttttgttcgtttgttttggttctggtggcactttgtcttacgatcaaactaacgaattggccttgggtttagaattgtccggtcaaaagtttttgtgggttgttagaactccaaacaacgaatctgctgatgctgcttatttgtctgatcaaaccttggacaacaatcctttggcttttttgcctaagggtttcgttgaaagaactgaaggtcaaggtttggctgttccatcttgggctccacaagctcaagttttgtctcatggttctactggtggtttcttgactcattgcggttggaattctattttggaatccgttatgcaaggcattccattgattgcatggccattatacgctgaacaaaagatgaatgcagttttgttggctgaggatttgaaagttgctttgaggccaaagactaacaagaacggtttgatcgatagagaagaaatcgccaaggttgttaagggtttgatggttggtgaagaaggtaaaaaggtcagaaacagaatgaaggatattaagattgctgccgtcaaggctttgtcagctgatggttcttctacaaaagctttgtctgaattggcttcccaatggaaaaatcatccaggtttctga

SEQ ID NO: 884 - protein, 468 aa, Quercus suber
MEQKPHIALLPSPGMGHLIPLVEFAKQFVLHHDFRITCIVPVLGSPSKAMKAVLQALPTTIDHVFLPPVKLEEEEIRGLKFEVQTILTLTRSLPPLREVLKSTRFSAFVVDPFGIDALDIAKELNISPYIFFPTNAFALSLIFHLPKLDKTVSCEYRDLPEPLKLPGCIPIHGRDLSEPVQDRTSELYKMFLRNAKRFRLAEGIIVNTFMELERSAIKALLDEEAKNLPLYPIGPIQSGSSNQVDKSESDCLRWLENQPHGSVLFVCFGSGGTLSYDQTNELALGLELSGQKFLWVVRTPNNESADAAYLSDQTLDNNPLAFLPKGFVERTEGQGLAVPSWAPQAQVLSHGSTGGFLTHCGWNSILESVMQGIPLIAWPLYAEQKMNAVLLAEDLKVALRPKTNKNGLIDREEIAKVVKGLMVGEEGKKVRNRMKDIKIAAVKALSADGSSTKALSELASQWKNHPGF

SEQ ID NO: 885 - DNA, 1401 bp, Castanea mollissima
  source 1..1401: mol_type = other DNA
atggaacagaagccacacattggtattttgccatctccaggtatgggtcatttgattccattggttgaattcgccaagttgttggttcatcatcacgatttcaacattacctgcatcattccagttttgggttctccatctaaagctatgaaggctgttttacatgctttgccaactaccatcgatcatgtttttttgccaccagttatcttggaagaggaagaaatgaagggtccaagattcgaagttcaaaccattttgactttgaccagatcattgccaccattgagagatgttttgaagtctactagattctccgcctttgttgttgatccatttggtattgatgctctggatatcgccaaagagttgaacatttctccctacattttcttcccaactaacgcttttgccctgtccttgatttttcatttgccaaagttggacgaaaccgtttcttgtgagtatagagatttgccagaaccattgaaattgccaggttgcattccaattcatggtagagacttggctgaaccttttcaaaacagaacctctgagtcttacaagatgttcttgagaattgccaagagattcagattggccgaaggtattatcgttaacaccttcatgggtttagaaggttctgctattaaggccttgttggaagaagaagctaagaacttgccattatatccagttggtccaatccaatccggttcctctaatcaagttgaagaatctgattgcttgaggtggttgggtaatcaaccacatggttcagttttgttcgtttgttttggttctggtggcactttgtcttacgatcaaactaacgaattggccttgggtctagaattgtcaggtcaaaagtttttgtgggttgttagaaccccaaacaacgaatctgctgatgctgcttatttgtctgatcaaaccttgtacaacaaccctttggcttttttgcctaagggtttcgttgaaagaactgaaggtcaaggtttggctgttccatcttgggctccacaagctcaagttttgtctcatggttctactggtggtttcttgactcattgtggttggaattctagcttggaatccattatgcaaggtattccattgattgcctggccattatacgctgaacaaaagatgaatgccgttttgttggctgaagatttgaaagttgctttgaggccaaagactaacaagaacggtctaatcgatagagaagaaatcgctaaggttgtgaagggtttgatggatggtgaagaaggtaaaaaggtcagaaacagaatgaaggatattaagattgctgccgaaaaggccttgaatgttgatggttcttctaccaagactttgtccaaattggcttctaagtggaagaaccactcttcgttctaa

SEQ ID NO: 886 - protein, 466 aa, Castanea mollissima
MEQKPHIGILPSPGMGHLIPLVEFAKLLVHHHDFNITCIIPVLGSPSKAMKAVLHALPTTIDHVFLPPVILEEEEMKGPRFEVQTILTLTRSLPPLRDVLKSTRFSAFVVDPFGIDALDIAKELNISPYIFFPTNAFALSLIFHLPKLDETVSCEYRDLPEPLKLPGCIPIHGRDLAEPFQNRTSESYKMFLRIAKRFRLAEGIIVNTFMGLEGSAIKALLEEEAKNLPLYPVGPIQSGSSNQVEESDCLRWLGNQPHGSVLFVCFGSGGTLSYDQTNELALGLELSGQKFLWVVRTPNNESADAAYLSDQTLYNNPLAFLPKGFVERTEGQGLAVPSWAPQAQVLSHGSTGGFLTHCGWNSSLESIMQGIPLIAWPLYAEQKMNAVLLAEDLKVALRPKTNKNGLIDREEIAKVVKGLMDGEEGKKVRNRMKDIKIAAEKALNVDGSSTKTLSKLASKWKNHSSF

SEQ ID NO: 887 - DNA, 1407 bp, Quercus suber
  source 1..1407: mol_type = other DNA
atggaacagaagccacatattgccttgttgccatctccaggtatgggtcatttggttccattggttgaattggctaagctgttgttgttgcatcatgatttccatattacctgcatcatcccagttttgggttctccatctaaagctatgaaggctgttttacaagctttgccaacctccattgatcatgtttttttgccaccagtcatcttggaagaagaagaaatcaaaggtttgaagttggaagtccaagctatgttgactttgactagatctttaccaccattgagggatgttttgaagtctactagattctccgctttcgttgttgatccatttggtattgatgctctggatatcgccaaagagttgaacatttctccctacattttcttcccatctaacgcttttgctctgtctttggttttacacttgccaaagttggacgaaactgtttcttgtgagtatagagatttgccagagccaatcaaattgccaggttgtattactatccatggtagggatttgttggaaccagttcaagatagaacttccgagttgtacaagatgttcttgtctaacaccaagagatacagattggccgaaggtattatcgttaacaccttcatggaattggaaggttctgctattaaggccttgttggaagaggaagctaagaatttgccattatttccagttggtccaatccagtctggttcctctaatcaagttgataagtctgaatccgattgcttgagatggttggataatcaaccacatggttccgttttgttcgtttgttttggttctggtggtactttgtcctacgatcaaactaacgaattggccttgggtttagaattgtctggtcaaaagttcatctgggttgttagaactccaaacaacgaatctgctgatgctacttacttgtctgatcaaactttgggtaacaaccctttggcttttttgcctaagggtttcgtcgaaagaacaaaaggtcaaggtttggttgttccattctgggctccacaagctcaagttttgtctcatggttctactggtggtttcttgactcattgtggttggaattctaccttggaatccattatgcaaggtatcccattgatcgtttggcctttgtttgctgaacaaaagatgaatgctgctttgttggcagaagatttgaaagttgctttgaggccaaagactaacaagaacggtagaatcgacagagaagaaattaccaaggttgtcaagggtttgatggttggtgaagaaggtaaaaaggtcagaaacagaatgaaggatattaagattgctgccgagaaagctttgtcagctgatggttcttctactaaggctttatctaagttggctacccaatggaagaatcactctgatttctga

SEQ ID NO: 888 - protein, 468 aa, Quercus suber
MEQKPHIALLPSPGMGHLVPLVELAKLLLLHHDFHITCIIPVLGSPSKAMKAVLQALPTSIDHVFLPPVILEEEEIKGLKLEVQAMLTLTRSLPPLRDVLKSTRFSAFVVDPFGIDALDIAKELNISPYIFFPSNAFALSLVLHLPKLDETVSCEYRDLPEPIKLPGCITIHGRDLLEPVQDRTSELYKMFLSNTKRYRLAEGIIVNTFMELEGSAIKALLEEEAKNLPLFPVGPIQSGSSNQVDKSESDCLRWLDNQPHGSVLFVCFGSGGTLSYDQTNELALGLELSGQKFIWVVRTPNNESADATYLSDQTLGNNPLAFLPKGFVERTKGQGLVVPFWAPQAQVLSHGSTGGFLTHCGWNSTLESIMQGIPLIVWPLFAEQKMNAALLAEDLKVALRPKTNKNGRIDREEITKVVKGLMVGEEGKKVRNRMKDIKIAAEKALSADGSSTKALSKLATQWKNHSDF

SEQ ID NO: 889 - DNA, 1407 bp, Quercus lobata
  source 1..1407: mol_type = other DNA
atggaacagaagccacatattgccttgttgccatctccaggtatgggtcatttgattccattggttgaattggccaagctgttgttgttgcatcatgatttccatattacctgcatcatcccagttttgggttctccatctaaagctatgaaggctgttttacaagctttgccaacctccattgataacgtttttttgccaccagtcatcttggaagaagaagaaatcaaaggtttgaagttggaagtccaagctatgttgactttgactagatctttaccaccattgagggatgttttgaagtctactagattctccgctttcgttgttgatccatttggtattgatgctctggatatcgccaaagagttgaacatttccccttacattttcttctcatccaacgcttttgctctgtctttggttttacatttgccaaagttggacgaaactgttccatgtgagtatagagatttgccagaaccagttaagttgccaggttgtattccaattcatggtagagacttgatcgaaccagttcaagatagaacttctgagctgtacaagatgttcttgactaacgctaagagatacagattggccgaaggtattatcgttaacaccttcatggaattggaaggttctgctattaaggccatgttggaagaggaagctaagaatttgccattatttccagttggtccaatccagtctggttcctctaatcaagttgataagttggaatccgattgcttgtcctggttggataatcaaccacatggttctgttttgttcgtttgttttggttctggtggcactttgtcttacgaacaaactaacgaattggccttgggtttagaattgtctggtcaaaagttcatctgggttgttagaactccaaacaacgaatctgctgatgctacttacttgtccgatcaaaatttgggtgataacccattggctttcttgccaaaaggtttcgtcgaaagaacaaaaggtcaaggtttggttgttccattgtgggctccacaagctcaagttttgtctcatggttctactggtggtttcttgactcattgtggttggaattctaccttggaatccattatgcaaggtatcccattgatcgtttggcctttgtttgctgaacaaaagatgaatgctgctttgttggcagaagatttgaaagttgctttgaggccaaagactgataagaacggtttgatcgacagagaagaaattgccaaggttgttaagggtttgatggttggtgaagaaggtaaaaaggttcacaacaggatggaagatattaagattgctgctgaaaaggctttgtcagctgatggttcttctacaaaagctttgtctaagttggctacccaatggaagaatcatccagatttctga

SEQ ID NO: 890 - protein, 468 aa, Quercus lobata
MEQKPHIALLPSPGMGHLIPLVELAKLLLLHHDFHITCIIPVLGSPSKAMKAVLQALPTSIDNVFLPPVILEEEEIKGLKLEVQAMLTLTRSLPPLRDVLKSTRFSAFVVDPFGIDALDIAKELNISPYIFFSSNAFALSLVLHLPKLDETVPCEYRDLPEPVKLPGCIPIHGRDLIEPVQDRTSELYKMFLTNAKRYRLAEGIIVNTFMELEGSAIKAMLEEEAKNLPLFPVGPIQSGSSNQVDKLESDCLSWLDNQPHGSVLFVCFGSGGTLSYEQTNELALGLELSGQKFIWVVRTPNNESADATYLSDQNLGDNPLAFLPKGFVERTKGQGLVVPLWAPQAQVLSHGSTGGFLTHCGWNSTLESIMQGIPLIVWPLFAEQKMNAALLAEDLKVALRPKTDKNGLIDREEIAKVVKGLMVGEEGKKVHNRMEDIKIAAEKALSADGSSTKALSKLATQWKNHPDF

SEQ ID NO: 891 - DNA, 1398 bp, Quercus suber
  source 1..1398: mol_type = other DNA
atggaacagaaaccgcatattgccatttttccgagtcctggtatgggtcatctgattccgcatctggaactggcaaaactgctggcactgcatcataattttcatatcacctgtattattagcgttctgggtagcccgagccgtgcaatgaaagaagttctgcaggcactgccgaccagcattgatcatgtttttctgcctccggttagcagcgaagatctggaaggtctgctgccggaagttcagaccattctgaccctgacacgtagcctgcctccgctgcgtgatgttctgaaaagcacccgttttgcagcatttattgttgatacctttggtatggatgcactggatgttgccaaagaatttaacattagcccgtatatcttttttctgagcaatgcatttgcactgagcctggttctgcatctgccgaaactggatgaaaccattagcggtgaatatcgtgatcaggcagaaccgctgaaactgcctggttgtgttccgattcatggtcgtgatctggccgagccggttcaggatcgtaccagctattggtataaaatgtttctgcgtagcaccaaacgtatgcgtctggccgaaggtattatgtttaatacctttatggaactggaagagaacgccattaaagcactgctggatgaagaagcaaaaagcctgccgctgtatccgattggtccgattattcagaccggtagcagcaatcagtttaaaggtagcgattgtctgcgttggctggatagccagccgcatggtagcgtgctgtttgtttgttttggtagcggtggcaccctgagctatgaacagaccaatgaactggcatttggcctggaactgagcgaacagaaattcctgtgggttgttcgtaccccgaataatgaaagtgccggtgcaagctatctgagcgatcagaccctggaaaataatccgctgaccagcctgccgaaaggttttgttgaacgcaccaaaggtcaaggtctggttgttccgagctgggcaccgcaggttcaggttctgagccatagcagcaccggtggttttctgagtcattgtggttggaatagcaccctggaatcagttatgcagggtattccgctgattgcatggcctctgtttgcagaacagcgtatgaatgcagttctgctggcagaagatctgaaagttgcactgcgtccgaaagcaaatgaaaaaggcctggttcatcgtgatgaaattgccaaagttgttaaaggtctgatggttggtgaagagggtaaaaaagttcatagccgtatgaaagacctgaaagatgcagcagaaaaagcactgagcgttgatggtagcagtaccaaagcgctgaccgatctggccctgcattggaccaatcaggcacgtttttaa

SEQ ID NO: 892 - protein, 465 aa, Quercus suber
MEQKPHIAIFPSPGMGHLIPHLELAKLLALHHNFHITCIISVLGSPSRAMKEVLQALPTSIDHVFLPPVSSEDLEGLLPEVQTILTLTRSLPPLRDVLKSTRFAAFIVDTFGMDALDVAKEFNISPYIFFLSNAFALSLVLHLPKLDETISGEYRDQAEPLKLPGCVPIHGRDLAEPVQDRTSYWYKMFLRSTKRMRLAEGIMFNTFMELEENAIKALLDEEAKSLPLYPIGPIIQTGSSNQFKGSDCLRWLDSQPHGSVLFVCFGSGGTLSYEQTNELAFGLELSEQKFLWVVRTPNNESAGASYLSDQTLENNPLTSLPKGFVERTKGQGLVVPSWAPQVQVLSHSSTGGFLSHCGWNSTLESVMQGIPLIAWPLFAEQRMNAVLLAEDLKVALRPKANEKGLVHRDEIAKVVKGLMVGEEGKKVHSRMKDLKDAAEKALSVDGSSTKALTDLALHWTNQARF

SEQ ID NO: 893 - DNA, 1410 bp, Quercus suber
  source 1..1410: mol_type = other DNA
atggaacagaaaccgcatattgcaattctgccgagtcctggtatgggtcatctgattccgtttgttgaatttgcaaaactgctgctgcttcaccatgattttcatattacctgcattattccgaccattggtagcccgagcaaagcaatgcgtgaagttctgcaggcactgccgaccagcattgatcatgtttttctgcctccggttagcctggaagaattaggtggtgttaaaccgggtattcagattaccctgaccatgattcgtagcctgcctccgctgcgcgaagtgctgaccagcctggttgcaacaacccgtctggttgcactggttgttgacctgtttggcaccgatgcgctggatgttgcaaaagaactgaatgttagcccgtatatcttttatccgaccaatgcaatggttgtgagcctggttctgcatctgccgaaactggatgaaaccgttagctgtgaatatcgtgatctgccggaaccggttaaactgcctggttgtgttccgattcatggtcgcgatctgctggatccgattcaggatcgtaccaccgaactgtataaactgtttctgcgtggtgcaaaatggctgcgtctggtggaaggtattattgtgaatacctttatggaactggatggcaacgttattaaagccctggaagatgaagaagcaaaaagcggcaccatttataccattggtccgattattcagagcagcagtaccaaacatgttgaaggtagtgatggtctgcgttggctggataatcagcctcgtggtagcgttctgtttgtttgttttggtagcggtggcaccctgagctatgatcagatgaaagaactggcactgggtttagaactgagcaaacagaaattcctgtgggttgttcgtagcccgaataatgaactggcccaggcagcatattttagcgatcagaccctggataataatccgctgagctttctgccggttggttttattgaacgtaccaaagaacaaggtctggttgttccgagctgggcaccgcaggcacaggttctgagccatgatagcaccggtggttttctgagtcattgtggttggaatagcaccctggaaagcattatgcagggtattccgctgattgcatggcctctgtttgcagaacagcgtatgaatgccctgctgctgaccgaagatctgaaagttgcactgcgtccgaaagccaatgaaaaaaatctggttgatcgtgaagaaatcgccaaagtgattaaaagcctgatggttggtgaagatggcaaaaaaatccatagccgtatgaaagacctgaaaatcgcagcagaaaaagcactgagcccgaatggtccgagcaccaaagcactggcagatctggcaagccattggaccaatcagagcaatagctaa

SEQ ID NO: 894 - protein, 469 aa, Quercus suber
MEQKPHIAILPSPGMGHLIPFVEFAKLLLLHHDFHITCIIPTIGSPSKAMREVLQALPTSIDHVFLPPVSLEELGGVKPGIQITLTMIRSLPPLREVLTSLVATTRLVALVVDLFGTDALDVAKELNVSPYIFYPTNAMVVSLVLHLPKLDETVSCEYRDLPEPVKLPGCVPIHGRDLLDPIQDRTTELYKLFLRGAKWLRLVEGIIVNTFMELDGNVIKALEDEEAKSGTIYTIGPIIQSSSTKHVEGSDGLRWLDNQPRGSVLFVCFGSGGTLSYDQMKELALGLELSKQKFLWVVRSPNNELAQAAYFSDQTLDNNPLSFLPVGFIERTKEQGLVVPSWAPQAQVLSHDSTGGFLSHCGWNSTLESIMQGIPLIAWPLFAEQRMNALLLTEDLKVALRPKANEKNLVDREEIAKVIKSLMVGEDGKKIHSRMKDLKIAAEKALSPNGPSTKALADLASHWTNQSNS

SEQ ID NO: 895 - DNA, 1413 bp, Quercus suber
  source 1..1413: mol_type = other DNA
atggatcagaaaccgcatattgcactgctgccgagtcctggtatgggtcatctgattccgctggttgaatttgcaaaactgctgctgcatcatcatggctttcatattacctgtattattccgaccaccggtagtccgagcaaagcaatgaaagaagttctgcaggcactgccgaccagcattgaacatgtttttctgcctccggttaatctggaagatctgaaaggtgcaaaaccgggtctgcagattgcactgaccatgacacgtagcgttccgagcctgcgtgatgttctgaccagcctggttgcaacaacccgtctggttgcactggttgttgatccgtttgcaattgatgccctggatgttgcaaaagaactgaatgttagcccgtatatcttttatccggcaaatgcaatggttctgagcctgctgctgaatctgccgaaactggatgaaaccgttagctgtgaatatcgtgatctgccggaaccggttaaactgcctggttgtattccgattcatggtcgcgatctgattgatccgattcaggatcgtaccagcgaatggtataaactgattctgcgttgggcaaaacaaatgcgtctggcagaaggtattatcgtcaatacctttatggaactggatggcaatgcaattaccgcactggaagaagaagcaaaaaatctgagtctgtataccgtgggtccgattattcagagcggtagcagcaatcaggttgaaggtagcgattgcctgcgttggctgaataaccagccgagcggtagtgttctgtttgtttgctttggtagcggtggcaccctgagctatgatcagatgaatgaactggcactgggtttagaactgagcaaacagaaattcctgtgggttgttcgtagcccgaataatggtctggcaaatgccgcatatctggcagatcagaccctggataataatccgctggcatttctgcctaaaggttttattgaacgcaccaaagaacaaggtctggttgttccgtattgggcaccgcaggcacaggtgctgagccatggtagcaccggtggttttctgagccattgtggttggaatagcaccctggaaagcattatgcatggtatcccgattattgcatggcctctgtttgcagaacagcgtatgaatgcagttctgctgaccgaagatttaaaagttgcactgcgtccgaaagccaatgaaaaaggcctggttgatcgtgaagaaattgccaaagttattaaaggtctgatggtgggtgaagagggtaaaaaagttcatagccgtatgaaagagctgaaaatcgcagcagataaagcagtgagcccgtatggtagctcaaccaaagcactggcagatattgcaagccgttggaccaatggtccggattttcgtacctaa

SEQ ID NO: 896 - protein, 470 aa, Quercus suber
MDQKPHIALLPSPGMGHLIPLVEFAKLLLHHHGFHITCIIPTTGSPSKAMKEVLQALPTSIEHVFLPPVNLEDLKGAKPGLQIALTMTRSVPSLRDVLTSLVATTRLVALVVDPFAIDALDVAKELNVSPYIFYPANAMVLSLLLNLPKLDETVSCEYRDLPEPVKLPGCIPIHGRDLIDPIQDRTSEWYKLILRWAKQMRLAEGIIVNTFMELDGNAITALEEEAKNLSLYTVGPIIQSGSSNQVEGSDCLRWLNNQPSGSVLFVCFGSGGTLSYDQMNELALGLELSKQKFLWVVRSPNNGLANAAYLADQTLDNNPLAFLPKGFIERTKEQGLVVPYWAPQAQVLSHGSTGGFLSHCGWNSTLESIMHGIPIIAWPLFAEQRMNAVLLTEDLKVALRPKANEKGLVDREEIAKVIKGLMVGEEGKKVHSRMKELKIAADKAVSPYGSSTKALADIASRWTNGPDFRT

SEQ ID NO: 897 - DNA, 1422 bp, Morella rubra
  source 1..1422: mol_type = other DNA
atggaaagcacccatacacaggcaagccatattgcaattctgccgacacctggtatgggtcatctgattccgctggttgaatttgcaaaacgtctgctgcatcatcatccgaacagctttaacattacctttattatcccgaccgatggtccgcctagcaaagcacagaaaagcgttctggatgcactgccgagcagcatgaattatttctttctgccggaagtgaatctggatgatgttccgaaaggtgcaaaaattgaaagcctgattagcctgaccgttgttcgtagcctgccgagcctgcgtgaagttctgaaaagcctggttgaaagcagcaaactggttgcatttgttgttgacctgtttggcaccgatgcctttgatgttgcacgtgaactgaatgttagcccgtatatcttttatccgagcaccgcaatggcactgagcctgtttctgtatctgccgaaactggatgaaatggttacctgtgaatatcgtgatcatccggaaccggttaaaattccgggttgtattccgattcatggtaaagatctgctggatccggttcaggatcgtaaaaatgatgcatataaatggctgctgcaccatgccaaacgttatcgtctggcagaaggtattctgaccaatagctttctggaactggaaccgggtgcaattgaagcactgcaggcagaagaaccgggtaaaccgcctgtttatccggttggtcctctggttaatatgggtagcagcggtaaagttgatggtagcgaatgtctgaaatggctggatgaacagccgcatggtagcgttctgtttgttagctttggtagcggtggcaccctgagcaccaaccagatgaatgaactggcactgggtttagaaaaaagcgaacagcgttttctgtgggttgtgcgtaccccgaatgatcatgttgcaaatgccacctattttagcgttcagagcgaaaaagatccgtttgattttctgcctaaaggtttcctggaacgtaccaaaggtcgtggtctggttctgccgagctgggcaccgcaggcacaggttctgagccatagcagcaccggtggttttctgacccattgtggttggaatagtattctggaaagcgttgttaatggtgttccgctgattgcatggcctctgtatgcagaacagaaaatgaatgcagttatgctgaccgaggatattaaagttgcactgcgtccgaaatttaacgataatggtctggcaggtcgtgaagaaattgcaaaagttgccaaagcactgatggaaggtgaagaaggtaaacgcctgcgtagccatatgaaaaatctgaaagatgcagccgcacgtgttctgagcgaagatggtagcagtaccaaagcgctgagcgaactggccctgaaatggaaaaataagaaataa

SEQ ID NO: 898 - protein, 473 aa, Morella rubra
MESTHTQASHIAILPTPGMGHLIPLVEFAKRLLHHHPNSFNITFIIPTDGPPSKAQKSVLDALPSSMNYFFLPEVNLDDVPKGAKIESLISLTVVRSLPSLREVLKSLVESSKLVAFVVDLFGTDAFDVARELNVSPYIFYPSTAMALSLFLYLPKLDEMVTCEYRDHPEPVKIPGCIPIHGKDLLDPVQDRKNDAYKWLLHHAKRYRLAEGILTNSFLELEPGAIEALQAEEPGKPPVYPVGPLVNMGSSGKVDGSECLKWLDEQPHGSVLFVSFGSGGTLSTNQMNELALGLEKSEQRFLWVVRTPNDHVANATYFSVQSEKDPFDFLPKGFLERTKGRGLVLPSWAPQAQVLSHSSTGGFLTHCGWNSILESVVNGVPLIAWPLYAEQKMNAVMLTEDIKVALRPKFNDNGLAGREEIAKVAKALMEGEEGKRLRSHMKNLKDAAARVLSEDGSSTKALSELALKWKNKK

SEQ ID NO: 899 - DNA, 1500 bp, Saccharomyces cerevisiae
  source 1..1500: mol_type = other DNA
atgtccactaagaagcacaccaaaacacattccacttatgcattcgagagcaacacaaacagcgttgctgcctcacaaatgagaaacgccttaaacaagttggcggactctagtaaacttgacgatgctgctcgcgctaagtttgagaacgaactggattcgtttttcacgcttttcaggagatatttggtagagaagtcttctagaaccaccttggaatgggacaagatcaagtctcccaacccggatgaagtggttaagtatgaaattatttctcagcagcccgagaatgtctcaaacctttccaaattggctgttttgaagttgaacggtgggctgggtacctccatgggctgcgttggccctaaatctgttattgaagtgagagagggaaacacctttttggatttgtctgttcgtcaaattgaatacttgaacagacagtacgatagcgacgtgccattgttattgatgaattctttcaacactgacaaggatacggaacacttgattaagaagtattccgctaacagaatcagaatcagatctttcaatcaatccaggttcccaagagtctacaaggattctttattgcctgtccccaccgaatacgattctccactggatgcttggtatccaccaggtcacggtgatttgtttgaatctttacacgtatctggtgaactggatgccttaattgcccaaggaagagaaatattatttgtttctaacggtgacaacttgggtgctaccgtcgacttaaaaattttaaaccacatgatcgagactggtgccgaatatataatggaattgactgataagaccagagccgatgttaaaggtggtactttgatttcttacgatggtcaagtccgtttattggaagtcgcccaagttccaaaagaacacattgacgaattcaaaaatatcagaaagtttaccaacttcaacacgaataacttatggatcaatctgaaagcagtaaagaggttgatcgaatcgagcaatttggagatggaaatcattccaaaccaaaaaactataacaagagacggtcatgaaattaatgtcttacaattagaaaccgcttgtggtgctgctatcaggcattttgatggtgctcacggtgttgtcgttccaagatcaagattcttgcctgtcaagacctgttccgatttgttgctggttaaatcagatctattccgtctggaacacggttctttgaagttagacccatcccgttttggtccaaacccattaatcaagttgggctcgcatttcaaaaaggtttctggttttaacgcaagaatccctcacatcccaaaaatcgtcgagctagatcatttgaccatcactggtaacgtctttttaggtaaagatgtcactttgaggggtactgtcatcatcgtttgctccgacggtcataaaatcgatattccaaacggctccatattggaaaatgttgtcgttactggtaatttgcaaatcttggaacattga

SEQ ID NO: 900 - protein, 499 aa, Saccharomyces cerevisiae
MSTKKHTKTHSTYAFESNTNSVAASQMRNALNKLADSSKLDDAARAKFENELDSFFTLFRRYLVEKSSRTTLEWDKIKSPNPDEVVKYEIISQQPENVSNLSKLAVLKLNGGLGTSMGCVGPKSVIEVREGNTFLDLSVRQIEYLNRQYDSDVPLLLMNSFNTDKDTEHLIKKYSANRIRIRSFNQSRFPRVYKDSLLPVPTEYDSPLDAWYPPGHGDLFESLHVSGELDALIAQGREILFVSNGDNLGATVDLKILNHMIETGAEYIMELTDKTRADVKGGTLISYDGQVRLLEVAQVPKEHIDEFKNIRKFTNFNTNNLWINLKAVKRLIESSNLEMEIIPNQKTITRDGHEINVLQLETACGAAIRHFDGAHGVVVPRSRFLPVKTCSDLLLVKSDLFRLEHGSLKLDPSRFGPNPLIKLGSHFKKVSGFNARIPHIPKIVELDHLTITGNVFLGKDVTLRGTVIIVCSDGHKIDIPNGSILENVVVTGNLQILEH

SEQ ID NO: 901 - DNA, 3207 bp, Saccharomyces cerevisiae
  source 1..3207: mol_type = other DNA
atgcgaggcttgacacctaagaacggtgtacatattgagacgggtccggatacagaatcgtccgcggactccagcaacttttctacaggtttcagcggcaagattcgtaagccaaggtcgaaagtaagtaaagcgtgcgataactgtagaaaaagaaagataaaatgtaatgggaagtttccctgcgcaagctgtgagatatattcatgtgagtgcacgttcagcactagacaaggtggcgctcgaataaaaaaccttcacaagacgagtttggaaggtacaaccgtacaagtcaaagaggaaacagattccagttcgacttctttttctaatcctcagcgatgtacagacgggccatgcgcagtggaacaaccaacgaaattttttgagaatttcaagctaggtggtcgtagtagtggtgataatagcggaagtgatgggaagaatgacgacgatgtgaatagaaacggtttttatgaagacgatagcgaatcacaggcaactttgacatctctacaaaccactctgaaaaatttgaaggagatggctcatttaggtacacatgtaacctcagccatcgagagcattgaacttcagataagtgacttgcttaagcgatgggaacccaaagtgaggaccaaagaattagcaacaacgaaattttaccctaataaatcaatagaaactcaattgatgaaaaacaaatactgtgatgtggtacatttgacaagatatgccgcttggtcaaacaataagaaggaccaagatacttctagtcaacctttgatcgacgaaatctttggtttgtactctcctttccaatttttgtcacttcaaggtattggtaaatgtttccaaaattatagatccaaatccaaatgcgagatttttcccaggaccgccaaggaaaccatatacatcatgttaaggtttttcgacgtttgttttcatcacatcaaccaaggctgtgtctccatagctaatcccctggaaaactacctacagaaaatgaatcttttaccttcaaccccatcttcgatatcatctgcagggagcccgaatacagcacacacaaaatcgcatgttgcgttagtgataaatcacttaccgcagccctttgtgagaaatataaccggaataagtaattctgagctactaagcgaaatgaataatgatatcagcatgtttggcattttattgaagatgttggatatgcataaaaattcctaccagaacttcctaatggaaatcacatctaacccctccgtggctaaaaacacgcagtcaattgatgtcttgcaggaattcatccattattgtcaagctggagaggcgctaatcgccttatgttacagctattataattctacattatacaactacgtggacttcacatgcgacataacgcatttagagcaacttctatactttttggatctgctattttggctatcggaaatatacggttttgaaaaagtcttgaacgtagcagttcattttgtttcaagagttggtttatcaaggtgggaattttacgtgggtcttgatgaaaactttgctgaaagaagaagaaatctctggtggaaagctttctatttcgagaaaactttagcctctaaacttggctatccttcgaacattgatgactccaaaatcaattgtttattacctaagaattttcgagatgttgggttcttggataatagagattttatcgagaacgtccacttagttcgcaggagcgaagcttttgacaacatgtgcatatccgacttaaaatactatggcgaattagctgtcttacaaatagtcagccatttctcatcatctgttttattcaatgaaaaattcacgtcaattaggaatacatcaaaaccatctgttgttagagagaaactactcttcgaggtactcgagatttttaacgaaacagaaatgaaatatgatgctatcaaagagcaaactggaaaattgttcgatattgcattctctaaagatagtactgaactcaaagtttcaagagaggataagattatggcttcaaaatttgttctattttacgagcaccatttctgcagaatggttaacgaatctgataatattgtcgccagattatgcgtgcacagaaggccctcaatactaattgaaaacttgaaaatataccttcacaagatttacaaatcatggaccgatatgaacaaaatcttattagactttgacaacgattattccgtataccgttcgttcgcccattattctatcagttgcattattttggtatcacaagcattctcagtggccgaattcattaaagtaaatgacgttgtgaatatgattagagtcttcaaaagatttttggatataaaaattttttccgaaaatgagaccaatgagcatgtcttcaacagccaaagctttaaagactatacaagagctttttctttcctgacaatcgtcactcgtatcatgcttttggcatacggagagtcctctagcaccaacctcgatgttatctccaaatatattgatgagaatgcgccagatttaaaaggtataatagaacttgtcttggatacaaactcttgcgcttatcgatttttattagaacctgttcagaagtcaggattccatttaacggtctcacaaatgttgaaaaatagaaagtttcaggaaccactaatgtcaaatgaagataataagcagatgaagcataattcgggaaaaaatttgaatccggatctcccaagtcttaagacgggcacttcatgcttactaaatggcattgaatcgcctcaattgccattcaatggtcgctcagcaccttccccagtgagaaacaactcactaccggagtttgcacaattgccttcatttaggtcattatccgtgtctgatatgatcaatcccgattacgcgcaaccaacaaatgggcaaaataatacgcaagtccaatctaataaaccaatcaatgctcagcagcaaatacccacttcagtacaagtaccatttatgaacacaaatgaaatcaataacaacaacaacaacaacaacaacaataaaaacaatattaacaatattaacaacaacaacagtaacaatttttctgcaactagttttaatttggggacactagatgaatttgttaataacggtgatcttgaggacctctacagtatcctgtggagcgacgtttatccagatagttaa

SEQ ID NO: 902 - protein, 1068 aa, Saccharomyces cerevisiae
MRGLTPKNGVHIETGPDTESSADSSNFSTGFSGKIRKPRSKVSKACDNCRKRKIKCNGKFPCASCEIYSCECTFSTRQGGARIKNLHKTSLEGTTVQVKEETDSSSTSFSNPQRCTDGPCAVEQPTKFFENFKLGGRSSGDNSGSDGKNDDDVNRNGFYEDDSESQATLTSLQTTLKNLKEMAHLGTHVTSAIESIELQISDLLKRWEPKVRTKELATTKFYPNKSIETQLMKNKYCDVVHLTRYAAWSNNKKDQDTSSQPLIDEIFGLYSPFQFLSLQGIGKCFQNYRSKSKCEIFPRTAKETIYIMLRFFDVCFHHINQGCVSIANPLENYLQKMNLLPSTPSSISSAGSPNTAHTKSHVALVINHLPQPFVRNITGISNSELLSEMNNDISMFGILLKMLDMHKNSYQNFLMEITSNPSVAKNTQSIDVLQEFIHYCQAGEALIALCYSYYNSTLYNYVDFTCDITHLEQLLYFLDLLFWLSEIYGFEKVLNVAVHFVSRVGLSRWEFYVGLDENFAERRRNLWWKAFYFEKTLASKLGYPSNIDDSKINCLLPKNFRDVGFLDNRDFIENVHLVRRSEAFDNMCISDLKYYGELAVLQIVSHFSSSVLFNEKFTSIRNTSKPSVVREKLLFEVLEIFNETEMKYDAIKEQTGKLFDIAFSKDSTELKVSREDKIMASKFVLFYEHHFCRMVNESDNIVARLCVHRRPSILIENLKIYLHKIYKSWTDMNKILLDFDNDYSVYRSFAHYSISCIILVSQAFSVAEFIKVNDVVNMIRVFKRFLDIKIFSENETNEHVFNSQSFKDYTRAFSFLTIVTRIMLLAYGESSSTNLDVISKYIDENAPDLKGIIELVLDTNSCAYRFLLEPVQKSGFHLTVSQMLKNRKFQEPLMSNEDNKQMKHNSGKNLNPDLPSLKTGTSCLLNGIESPQLPFNGRSAPSPVRNNSLPEFAQLPSFRSLSVSDMINPDYAQPTNGQNNTQVQSNKPINAQQQIPTSVQVPFMNTNEINNNNNNNNNNKNNINNINNNNSNNFSATSFNLGTLDEFVNNGDLEDLYSILWSDVYPDS

SEQ ID NO: 903 - DNA, 2931 bp, Saccharomyces cerevisiae
  source 1..2931: mol_type = other DNA
atgaaagtgaagaaatcaactagatcaaaagtttcgacagcatgtgtcaattgcagaaaaaggaaaatcaaatgcacaggtaaatatccatgtaccaactgcatttcttacgattgtacgtgtgtattcctaaaaaaacatttaccgcagaaggaggatagttcccagtctttgcctactacagctgttgctccaccctcttcccacgccaatgtagaggcttcagcagatgtacagcatctggacactgcgattaagctagataatcaatattacttcaaactgatgaacgacctgatacagactccagtctctccgagtgcgacgcatgctcctgatacttccaataatcctactaatgataataatattctctttaaagatgattccaaatatcaaaatcaactggttacgtatcaaaatattctgacaaatttgtacgctctgccgccttgtgatgacactcagctcttgattgataaaacgaagtcgcagttgaataacctgattaacagttggaatcccgaaataaactaccccaagctttccagtttctctcctcgcccacaaagatcgatagaaacgtatcttttaaccaacaagtatagaaataaaatacacatgacgaggttctccttttggacagaccaaatggttaaatcacaaagtccagattcatttctagccaccactccactagtagatgaagtatttggtcttttctctccaatacaggctttttcactaagaggtataggatatttaattaaaaaaaatatcgaaaacacgggttcatcgatgttaatagatacaaaggaaactatttatctaatattaagattgtttgatttgtgttatgaacatttgatccaaggttgcatctctatttctaatccattagagaactatcttcaaaaaataaagcaaactcctactacgacggcatctgctagtttgcctacttccccagcacctttatctaacgatttagtcatttctgttattcatcaactacctcagccatttatacaatcgattaccgggtttacgactactcaattgatagaaaatttacatgattcattttcgatgtttcgaatagttactcaaatgtatgctcaacataggaagcgctttgcggaatttttaaaccaagctttctccttgccccatcaagaaaagagtgttttattctcgtcattctgctcatcagaatatcttctatctactctttgttacgcatactacaatgttaccctatatcacatgttggacataaacactttagattacctagagattttagtgtcattgctagaaatccaaaatgaaattgatgagcgttttggatttgaaaaaatgctagaagttgcggttacatgctccactaagatgggattgtctcgttgggagtattatgttggaatagacgaaaatactgccgaacggagaagaaaaatatggtggaaaatatacagtctggaaaagcgttttttaactgatcttggtgatttatccttaataaatgaacatcaaatgaattgtctcttgccgaaggatttcagggacatgggattcattaaccataaagaatttttaacgaaaattggtacgtcctctttatcaccgtcatcgcccaagctaaaaaacttgtcattgtccaggcttattgaatatggtgagttagcgatagcccaaattgttggagattttttttcagagactctttataatgagaaattcacgtctttagaagtatccgttaaacccacaattatcagacaaaagttattggagaaagtttttgaggacattgaatcttttaggttaaaattggccaaaataaagcttcacacctcaagagtttttcaagtagctcactgcaaatatccagaatatccaaaaaacgatctaattgaagcagctaaatttgtaagttaccataaaaatacatggttctccatcttgggtgctgttaacaatcttattgctaggctatctgaagatccagaggtgataactgagcaaagcatgaaatatgcgaatgaaatgtttcaagaatggagggaaattaatcaattcttaatacaggttgatactgattttattgtttgggcatgtttggacttttatgaactgatatttttcgtgatggcttcaaaattttatgtggaagacccgcacatcactttagaggatgttatcaacactttgaaagtttttaagagaataactaacattatttctttttttaataataatttggacgagaaggattatgattgtcaaactttcagggagttttcgagaagttcgagtttggttgccatatccataagaatcatatttttaaaatactgctatgccgaacaaattgatagagccgaattcatcgaacgtttgaaagaagttgaaccgggtctaagtgaccttttgcgtgagttttttgatacccgctcttttatttacaggtacatgttgaaatccgttgaaaaatcaggctttcatttaataattagaaaaatgttagaaagcgactataaatttttgtatagagacaaattggccactggtaatattccagaccaaggaaattcaagccaaatttctcagttgtatgacagtactgctccttcatacaacaatgcttctgcctcagcagcaaactcaccgttgaagttatcgtctttgttgaactctggagaggaatcgtacactcaagacgcatcagaaaatgttccatgtaatctgcggcatcaagatcgatcgttacaacagacaaaaagacaacattctgcgcctagccaaataagcgctaatgagaataatatatacaacttgggtactttagaggagtttgtcagcagtggtgacctgactgatttatatcatactctgtggaatgacaatacttcatatcccttcttatga

SEQ ID NO: 904 - protein, 976 aa, Saccharomyces cerevisiae
MKVKKSTRSKVSTACVNCRKRKIKCTGKYPCTNCISYDCTCVFLKKHLPQKEDSSQSLPTTAVAPPSSHANVEASADVQHLDTAIKLDNQYYFKLMNDLIQTPVSPSATHAPDTSNNPTNDNNILFKDDSKYQNQLVTYQNILTNLYALPPCDDTQLLIDKTKSQLNNLINSWNPEINYPKLSSFSPRPQRSIETYLLTNKYRNKIHMTRFSFWTDQMVKSQSPDSFLATTPLVDEVFGLFSPIQAFSLRGIGYLIKKNIENTGSSMLIDTKETIYLILRLFDLCYEHLIQGCISISNPLENYLQKIKQTPTTTASASLPTSPAPLSNDLVISVIHQLPQPFIQSITGFTTTQLIENLHDSFSMFRIVTQMYAQHRKRFAEFLNQAFSLPHQEKSVLFSSFCSSEYLLSTLCYAYYNVTLYHMLDINTLDYLEILVSLLEIQNEIDERFGFEKMLEVAVTCSTKMGLSRWEYYVGIDENTAERRRKIWWKIYSLEKRFLTDLGDLSLINEHQMNCLLPKDFRDMGFINHKEFLTKIGTSSLSPSSPKLKNLSLSRLIEYGELAIAQIVGDFFSETLYNEKFTSLEVSVKPTIIRQKLLEKVFEDIESFRLKLAKIKLHTSRVFQVAHCKYPEYPKNDLIEAAKFVSYHKNTWFSILGAVNNLIARLSEDPEVITEQSMKYANEMFQEWREINQFLIQVDTDFIVWACLDFYELIFFVMASKFYVEDPHITLEDVINTLKVFKRITNIISFFNNNLDEKDYDCQTFREFSRSSSLVAISIRIIFLKYCYAEQIDRAEFIERLKEVEPGLSDLLREFFDTRSFIYRYMLKSVEKSGFHLIIRKMLESDYKFLYRDKLATGNIPDQGNSSQISQLYDSTAPSYNNASASAANSPLKLSSLLNSGEESYTQDASENVPCNLRHQDRSLQQTKRQHSAPSQISANENNIYNLGTLEEFVSSGDLTDLYHTLWNDNTSYPFL

SEQ ID NO: 905 - DNA, 2433 bp, Saccharomyces cerevisiae
  source 1..2433: mol_type = other DNA
atgaaaagaagaagcgatgctttgttgggaagtttccaggccaccaacgttacgccgccaagcgataatagtaatagtacggccggtggagccaatggaagtaactcaggaacaccaacttctactagcggtaagaagagaaacaagcttataaaatcttgtggcttttgcagaaggagaaaacttcgttgtgatcagcaaaaacctatgtgttctacatgcatttctagaaacttaacaacctgtcaatatgctgaagaattcaacaaaaacatcgaaaagaaagctacctatggtccctatcctaacgccgatttacttaagaaagttgaagaactagaaaacaaaatacgtattctagaagctgaaaaaaacactaattcgtctgcgagctccatgtacacttcgccaaatttccctcctttaggcactagtgtaggtagaggttctactgaaacttcatctccattacccgatggtgtaataaatccatatgccgaccggtactacctacaaagtaaacattccggaagatcaacactatacggccccacttctatgagaacccaaattgcaaatagtaattgggggttcattgaaaaatataaacaattatgggcgaaggttaaagtagaaagaaataaatggaagcaaaacaaccaaaaaacgatgtgcagggaactaggccttttggatgagtcggattggcagccagatccattaatcaaacagatatgtcgtttcctaccatcatataacaaagctttgtctattttagatgatttctttaatgatggagcatgcaatgagatcaacgtgattcttgataaggcaaaagttagaagagactttttagattatttcatgcccgaaaaagaggtaaaggcggaaggtgacagatccatagtttatattttatccaatccaaagaaaaattattacaaagctgctgtgatactattaatcctatgtctgaaatacttccatacagatgtcccaaccccaattgagaagttctttactttactaaagggggcctccaccgctaaggtgttctacattgagcgtgcacaaatgttaatacttttctactaccatcgtgaaacatattcattcggtggagatggctccgatttggttaatataaatgaatgtttagttactacggttactacaatagggttgcatttaaacattagagaaactttcaaggaacatgaggtttttatgggtagcatcgaaagtttagaaaatgtctggttaatggcaatatttatcgattataacatatcttgtaacgttggtagacccttattgattaacaaattttatctagacgaaaaccaagatcattgcatattgaatagtaaaagtaaaacatatgaggggaagctgaaaagatatttaaaacttacaaggccaatgttgttaactctttatgatagagataaattcccggatttgaaagcttattccaagcgaattatcaattttgtagaagaagaacttggtccacttggacattacacaggtgaaaatatatcggaagaagttccattaagggaaagtagaattttaagtatggcagtcggactattattgtcgttttatgcactaatacattctgtgctgaaagtcagaaacatagaatccaaaaataatacgtttcaattggttttgatcaatttttccatcattgtgaataccacaattcgatgctatcgtatcgacaaagcactttacccagagaaattcgaagcctccaacccgcacttaccgccacatatggcgttatcaatgagcctcacggcagggcttttttccaaaacattggtgtttttttgttctctgatctactttaagttgacgcttttcgaaaatggactatgtctatccaacgatatggaagttggatggtcggatttgacgaaattgactgttcctttagacaaggatctatctttaggtacagcaatgagcttgtactcgtcaatcttcgatcgcttgttcacggtcggaaataaagaattaatacgcacaatgcatagatcatcacaatttgtgatagagctagctattgaaaggacctataggactattcttggcaacgttattgaattcagaaagttgaccgaggaaacatggctagcacaaatcaaacaagaactagatccgcagagcgataatccatcatcagaagctaaaattgtgagtgataggcagcgggatctcagccttgcagttccaacgcccacgccctcaataattccaatgttaccctcgcctggtgaaactaagaaccatgcaaagagtcaatcagagatcattcagatgctgacagatgaattttgggcaaattataactcaggctgggaagagttgattaatcaatctgaattttccactcttttcgatgattacaaagacaattaa

SEQ ID NO: 906 - protein, 810 aa, Saccharomyces cerevisiae
MKRRSDALLGSFQATNVTPPSDNSNSTAGGANGSNSGTPTSTSGKKRNKLIKSCGFCRRRKLRCDQQKPMCSTCISRNLTTCQYAEEFNKNIEKKATYGPYPNADLLKKVEELENKIRILEAEKNTNSSASSMYTSPNFPPLGTSVGRGSTETSSPLPDGVINPYADRYYLQSKHSGRSTLYGPTSMRTQIANSNWGFIEKYKQLWAKVKVERNKWKQNNQKTMCRELGLLDESDWQPDPLIKQICRFLPSYNKALSILDDFFNDGACNEINVILDKAKVRRDFLDYFMPEKEVKAEGDRSIVYILSNPKKNYYKAAVILLILCLKYFHTDVPTPIEKFFTLLKGASTAKVFYIERAQMLILFYYHRETYSFGGDGSDLVNINECLVTTVTTIGLHLNIRETFKEHEVFMGSIESLENVWLMAIFIDYNISCNVGRPLLINKFYLDENQDHCILNSKSKTYEGKLKRYLKLTRPMLLTLYDRDKFPDLKAYSKRIINFVEEELGPLGHYTGENISEEVPLRESRILSMAVGLLLSFYALIHSVLKVRNIESKNNTFQLVLINFSIIVNTTIRCYRIDKALYPEKFEASNPHLPPHMALSMSLTAGLFSKTLVFFCSLIYFKLTLFENGLCLSNDMEVGWSDLTKLTVPLDKDLSLGTAMSLYSSIFDRLFTVGNKELIRTMHRSSQFVIELAIERTYRTILGNVIEFRKLTEETWLAQIKQELDPQSDNPSSEAKIVSDRQRDLSLAVPTPTPSIIPMLPSPGETKNHAKSQSEIIQMLTDEFWANYNSGWEELINQSEFSTLFDDYKDN

SEQ ID NO: 907 - DNA, 2106 bp, Saccharomyces cerevisiae
  source 1..2106: mol_type = other DNA
atggatggatcccattttcctatgaaatctactaccggagagcccgtttcaagtggtaagaagggcaagaggaggaaggtcatcaagtcatgtgcattttgtagaaaaagaaaactgaaatgcagtcaggccaggcctatgtgtcagcaatgtgtaattagaaaactaccgcaatgcgtttacacagaagagttcaactatcccttgtctaatacggaactgttcgagcaagtgcccaatgtagcgttggttcagaagattgagaatttgcagactctactgaaggaaaacgataacaataatgcgaaaccggtgtattgcaggagttcagaaaatccattacggtcactgagaacttcggttttaggtgataatggctcgaggtatgtgtttggccccacttcctggaaaactttatctttgtttgaacaaaataagtttcaaactgagtttcaaaatttatggaaagtcttgaaaccacttcctgaatgcactaaatcgcaattaaatgaaaatgatgttgtagcagatttgcctagttttcctcaaatggaaagctgtattaaatctttttttgctggaccgctgttcggcatattgcatatcttcaaccaagacgatattctgtccctcttggacagactttttattagagataccacggacaagaacctagtcatcctcctcgatttgcaaggtaatgcaaaagataagtataatcttggcattgtacttcaaattctttgcttgggctattataaccaagatatcccttcttccgtgagtcatttccttcacactttaagtgcagcgtccttgtcatcatcgagctcaaatttcgtggaaaaactacaatttttcttattgtcctatattagtgtaatgataaattgcacggacggtgtatgggatgcgactcaaggcgttgacttaatcaacgagctatgccaggggtgcataagtttgggtttaaatgatattgataaatggtatttgaacgaaagtgaggaaaccaaacaaaacttgaggtgtatttggttttgggctttattccttgatgtatccacctcatatgatataggtaatcctccgtctatttcagatgatcttttggacttaagtatatttactgcgcagaatttccaatcaccgagtattgactttaggagagttaagctaatgcacgattttttagatgtttcccgattcactactcgtgaaattcacaagagagagatgaacgaaaaattgaccactttttcattgagattgattgaatttatacaatctaacttttcacctatcgaacattatacaaattcagtttactactctgatattgatccctttgatatattgattttatcaagatctctaagtatagttgctagtatatacaatattgagatgatcatcgctcaacaaagcagaatcatagataagaacagaatggttcagttcttgttgatatccatatcagtctgtgttaatacaatggtatttcattttaaagagcctatcaacgaccaggagaacgtgttaactgaagggctaaaactgtctattattctaatcaatccacttttaatacgaatagtatcgcaagtgtacagtttagcatttaataggttaatcttcagggagaaggcattccttttccttattgaccttgacactgggaaaaaaatacaattcattaaatatgaagaagaaaactttgatgaacttttgacaggattcgatgttaggactgataaatttctgtcattttcaggaacaataataagattttacgaaattattgatagcatatttgctgttaatgaaagaaataagcgattgttaaaagcagtttccaatttttatcagttaacttcaactttggcgtttgaacgcgtaagtagggttttattcgataaagcgtcccaagcaagaatagagactgaaaaaatttggctgaaaaagggcattaatatggagcacttcagtgatctcatgattgaagattttattaatgatgtttggaaaacgttcaaagagatttccaaagacctttggtccattgacaaaaagaaattttataaacaatatcatttcgatttataa

SEQ ID NO: 908 - protein, 701 aa, Saccharomyces cerevisiae
MDGSHFPMKSTTGEPVSSGKKGKRRKVIKSCAFCRKRKLKCSQARPMCQQCVIRKLPQCVYTEEFNYPLSNTELFEQVPNVALVQKIENLQTLLKENDNNNAKPVYCRSSENPLRSLRTSVLGDNGSRYVFGPTSWKTLSLFEQNKFQTEFQNLWKVLKPLPECTKSQLNENDVVADLPSFPQMESCIKSFFAGPLFGILHIFNQDDILSLLDRLFIRDTTDKNLVILLDLQGNAKDKYNLGIVLQILCLGYYNQDIPSSVSHFLHTLSAASLSSSSSNFVEKLQFFLLSYISVMINCTDGVWDATQGVDLINELCQGCISLGLNDIDKWYLNESEETKQNLRCIWFWALFLDVSTSYDIGNPPSISDDLLDLSIFTAQNFQSPSIDFRRVKLMHDFLDVSRFTTREIHKREMNEKLTTFSLRLIEFIQSNFSPIEHYTNSVYYSDIDPFDILILSRSLSIVASIYNIEMIIAQQSRIIDKNRMVQFLLISISVCVNTMVFHFKEPINDQENVLTEGLKLSIILINPLLIRIVSQVYSLAFNRLIFREKAFLFLIDLDTGKKIQFIKYEEENFDELLTGFDVRTDKFLSFSGTIIRFYEIIDSIFAVNERNKRLLKAVSNFYQLTSTLAFERVSRVLFDKASQARIETEKIWLKKGINMEHFSDLMIEDFINDVWKTFKEISKDLWSIDKKKFYKQYHFDL

SEQ ID NO: 909 - DNA, 4254 bp, Debaryomyces fabryi
  source 1..4254: mol_type = other DNA
atggtcgaaaacaaggccaacaagttggactcttcatctttggaagataacggtttggaaagacaacagaggttgttgtcatttttgtggccaaaaactgttccaccattgccaaatgaagatgagagattgctatacggtgaaaagagagctggtattttctctaaggctttcttctggtggatgatcccagttatgaatccaggttatatgagaaccttgcagccagaagatttgttcactttgaccgatgatatctccgtcgaacaaatgtctgctaggtttaacaagctgttcaagaagaaggttgataaggctaagagaaagcacatcatccaaaagttcaagaacagaaacgaaaaggtcgagatctccgatattgatcagtacaaggatgacttggaagatttcactccaccacaatttttgccatggttcgttattatcgaaaccttcaagtgggaatacttcgctgctgttattttcttggctttgatgtacggtacgagttcttgtattgctctggttaccaaagagttgatcaagtacgttgagtacaaagccgttggtgttgaattaggtattggtaaaggtttgggttacgcttttggtactgttggtatggttgttttcactggttttatgggtaaccactacttctacagagctatgttgattggtgctaagactaaggccgttctgattaagtctatcttggacaagtccttcatcctgtctccaaagtctaagttgaatttcccacatgccaagatcacctctatgatgtctactgatactgccagaattgacttaggtttgggattgcaacctctgctgttgattattccaattccaatcatcgtttcgatcgccatcttgatcgttaacattggtgtttctgctttgactggtattgccgttatcatcttggttttggttttgattatgggtgtcggctacttcttgttcaagtttagaaagaaggctaacatctccaccgaccaaagaatttcttctatcagagaagtcctgtacaacctgaagatcatcaagttttactcttgggaatccgcctacttgaagaagatttctggtattaggaacgaagagactaagtggatcttgagaatgcaagtcttgaggaacttgattatctccattgccatctccgttaacttgatctgttctatggtttccttcttggtcttgtacgccattgattctgatagacatgatccagcttctatcttctcttctttgaccttgttcggtatcttgtccgaacaagttattatgttgccattggctttggctactactactgatgctcatgttggtttacaaagagtcggtcaatttttggcctctgaagaatctgatcaaacctacagaaagattgaagcttctggtaagactttgggtcgtatgcaagaaaacaacattgccgttgaagttaacaacgccactttcatttgggaaaccttcgatgtttctgatgaggactctaaaatctccgacgaaaactctgatgagtccaagaattcctctactaccaactctacttccgaaagaaacttggatgaagaggataaggataacgaaactccattcaagggtttgatcgatgtcaacttgactgttaacaagggtgaattcgttgttatcaccggtgttattggttccggtaaatcatctttgttgtccgctatttctggtttgatgactagaacttccggtgaagttaatgtttgcggttctttgatttcttgtggtgaaccatggattcagaacgagactttcaaagagaacattttgttcggttccgatttcgacccagacttctacaaagaagttgttcacgcttgttccttggaatccgatatggaaattttgccagctggtgataagaccgaaattggtgaaagaggtattactttgtctggtggtcaaaaggctagattgaatttggctagagctgtttacaccaacaaggacattatcttgttggatgacgttttgtcagctgttgatgctagagtcggtaaacatattatgaacaactgcatcttgggcaccttgtcctctaaaactagaattttggctacccaccagttgtctttgattggttctgctgataaggttatcttcatgaacggtgatggttctttggaaatcggtaagttcgatgaattgatccagaactcttctggtttcaaggacttgatgtctttgaatgctcaagaggttgtcagagatgttaccaacaatgttgaaaacgattccaagtttgctggtgttgaggacgaaaaacagtacatcgaagaacagttgatgagaagaactaccaccacctcttatattgaggatgagaaatctggtagaaacggcgttaatttggatagaattgatgacggcaagctattcttggctgaagaaagagctgttaaccgtatcgaattcaaggtctacaagaattacgtcaagtacggttctggtatcttctcctcattctgcatcattttcttgttcttgttgttcactgtcttggctacttacttcgagttgtttactaatacctggttgtccttctggacctctaaaaagtttccaggtagattggacaacttctacattggcttgtacgttacttttaccttcttggcctttatcttcctgaccttggaatttttcgttttggcttacgttactaccattgcctctagaactttgaatttgatggccgtcaagaagatcttgtttgtcccaatgtctttcatggatacaactccaatgggtagaatcttcaacagattcactaaggataccgatgctttggacaacgaaatcgttgaacaattgaccgtcctgttctacttcattgctaacattaccggtgttctgattttgtgcatttgttacttaccctggttcgctattgctgttcctcctttgttgtttttgttcgttgctattgctaactactaccaggcttctgctagagaaatcaagagattggaagcagttcagagatccttcgtttacgacaatttcaacgaaaccttgtctggtatgggtactatcgttgcttacaaatctaagcacaggttcctaaacaaaaactccttcctgatcgacaaaatgaacgaagcttactacttgactattgccaatcagagatggctgaccatttctttggatatggttggtgctgttttcgtcttattggttgctatgttgtgcgttaacagagtgttccacattaactcatcatccgttggtttgctaatgtcctacatcttgcaaatcgttggccaattgtctttcttgctgaaaactttgacccaagtcgaaaacgaaatgaactccgttgaaagaatttgccattacgctttcgatttgcctgaagaagctccatacgttatcactgaaaattctccaccaccatcttggccagaaaaaggtcaaatttcttttaaccatgcctccatggcttacagaccagaattaccattggtcttgaaggatttggatgtcaacattaagcccatggaaaagataggtgtttgtggtagaactggtgctggtaagtcatctattatgatggccttgtacagattggtcgaattgaattctggttccgtcgaaattgatggtatcgatatttctaccttgggcctgaacaatttgagatccagattgtccattattccacaggatccaattttgttctccggtactattagaactaacttggatccattcgatgagtacactgatacagaattgtgggatgctttgaagagatccggtttgattgatgagagcaagatctcttctgttcaatcccaagatccaaagtccgaagatttgaacaagttccatttgttcaagcaggtccaagaaaacggtacaaacttttcattgggtgagagacaattgattgctttcgctagagctttggtcaagagaactaagatcttgattttggacgaagctacctcttccgttgattacgaaactgataacaagattcaaaagaccatcctgaaagagttcggtacttgcaccattttgtgtattgcccatagactgaaaaccatcatcaactacgataggattttggtcttggaaaagggtgaagtcaaagaattcgacactccatggaatctgttcaacactaaggactccattttcgaacagatgtgcagaaaatccaagattacttccgatgatttcaccatcaagaccatctga

SEQ ID NO: 910 - protein, 1417 aa, Debaryomyces fabryi
MVENKANKLDSSSLEDNGLERQQRLLSFLWPKTVPPLPNEDERLLYGEKRAGIFSKAFFWWMIPVMNPGYMRTLQPEDLFTLTDDISVEQMSARFNKLFKKKVDKAKRKHIIQKFKNRNEKVEISDIDQYKDDLEDFTPPQFLPWFVIIETFKWEYFAAVIFLALMYGTSSCIALVTKELIKYVEYKAVGVELGIGKGLGYAFGTVGMVVFTGFMGNHYFYRAMLIGAKTKAVLIKSILDKSFILSPKSKLNFPHAKITSMMSTDTARIDLGLGLQPLLLIIPIPIIVSIAILIVNIGVSALTGIAVIILVLVLIMGVGYFLFKFRKKANISTDQRISSIREVLYNLKIIKFYSWESAYLKKISGIRNEETKWILRMQVLRNLIISIAISVNLICSMVSFLVLYAIDSDRHDPASIFSSLTLFGILSEQVIMLPLALATTTDAHVGLQRVGQFLASEESDQTYRKIEASGKTLGRMQENNIAVEVNNATFIWETFDVSDEDSKISDENSDESKNSSTTNSTSERNLDEEDKDNETPFKGLIDVNLTVNKGEFVVITGVIGSGKSSLLSAISGLMTRTSGEVNVCGSLISCGEPWIQNETFKENILFGSDFDPDFYKEVVHACSLESDMEILPAGDKTEIGERGITLSGGQKARLNLARAVYTNKDIILLDDVLSAVDARVGKHIMNNCILGTLSSKTRILATHQLSLIGSADKVIFMNGDGSLEIGKFDELIQNSSGFKDLMSLNAQEVVRDVTNNVENDSKFAGVEDEKQYIEEQLMRRTTTTSYIEDEKSGRNGVNLDRIDDGKLFLAEERAVNRIEFKVYKNYVKYGSGIFSSFCIIFLFLLFTVLATYFELFTNTWLSFWTSKKFPGRLDNFYIGLYVTFTFLAFIFLTLEFFVLAYVTTIASRTLNLMAVKKILFVPMSFMDTTPMGRIFNRFTKDTDALDNEIVEQLTVLFYFIANITGVLILCICYLPWFAIAVPPLLFLFVAIANYYQASAREIKRLEAVQRSFVYDNFNETLSGMGTIVAYKSKHRFLNKNSFLIDKMNEAYYLTIANQRWLTISLDMVGAVFVLLVAMLCVNRVFHINSSSVGLLMSYILQIVGQLSFLLKTLTQVENEMNSVERICHYAFDLPEEAPYVITENSPPPSWPEKGQISFNHASMAYRPELPLVLKDLDVNIKPMEKIGVCGRTGAGKSSIMMALYRLVELNSGSVEIDGIDISTLGLNNLRSRLSIIPQDPILFSGTIRTNLDPFDEYTDTELWDALKRSGLIDESKISSVQSQDPKSEDLNKFHLFKQVQENGTNFSLGERQLIAFARALVKRTKILILDEATSSVDYETDNKIQKTILKEFGTCTILCIAHRLKTIINYDRILVLEKGEVKEFDTPWNLFNTKDSIFEQMCRKSKITSDDFTIKTI

SEQ ID NO: 911 - DNA, 4167 bp, Wickerhamomyces ciferrii
  source 1..4167: mol_type = other DNA
atgtcctccaacacctccatgaaggatgaagatgattaccaagacttggaaaagtccaacgctcatattcaacaacctagaccagtcaagagattattgactcctttgttgactaagtacgtcccaccaattccacaagaatctgaaagaactagattcccattctaccacaccaacattttctctaaggctttgtttgcttggttgttgcctttgttgtttaagggttacaagagaaccttgcaacaagaggatttgtggaagttggatgaacatacctctatcgatcacgtctacatcaagtttgaaaagcacttgaacgaagagtggttgaagttcgatgctaaacatgatccaatcaagaacccagatgcttttcctagattcgctattttcatggctttgatgaagaccttcaagtacgagtatactgttgctatcgttaccaagattatctccaatgctttgtccgcttttaccccattggtttccaaaaagttgatctccttcatctccgaaaaagctttggttccagatacgcctattaacaaaggtattggttacgctttcggtatcaccttcatgttgatgttctctgccatctttatgaaccagtccttgttgcattctaagttcgttggtggtcattccagaactattttgaccaaggctttgatccaaaagtccttgattgctaacgctgaaaccagatttcattacccatccggtagaatcatctcattcatgtctgctgacttgcaaagaatcgacgaatctttgtttgaattgccaactggtttcactaccttggagccaattatcattgctattgtcttgctgatcgttaacattggtgtttctgctttggctggtattgctatctttttcttgaccttgatcttgatgggtgttccagctggttctttgttcaaaattagagaagctgctaacgtgttcaccgatcaacgtgttggtaaaatgagagaagtcatccagtctatgaagatgatcaagttctactcttgggaagatgcctacgaaaacttgattaccggtatcaggtctaaagagtcctctttggttttgaagttccagttgaccatcaacgtcatgattactattgctattaacgcctcctccattacttctatgggtgcatttttggtcttgtacgctgttaagtctcatggtaatccagctaacgttttctcctctttgtctttgttcggtatcttgtcccaacaagttatcgaattgcctatggtttttagctctgctgctgaaggtttgttgtccttggatagaattacgaagtacttgagatctccagttgaaacctttgacgtcgaaaacttctacgactccgaattgattaagaacgacgaaattgccgtccaaatcgaaaatggtgaatttgaatgggagctgttcactgagatcaaagaagatgacgaagaaacgaaaaagcagaagaagaaggacgaaaagcagcgtaagaaagagctgaaaaagtctcaaggtggtaatggttggttcaacaaaaagactaagaccaccgaagattcctccaatgacgaaatcaacaaagaatcctctaccgacgaagataacactaatcaacagaagccattcaagctgtccaacatcaacttaaagatttccaagggtgaattcatcgttgttactggtccaattggttccggtaaatcttctttattgtccgctatttctgccttcatgactaagactgatggtaagattgctatcaacggctctaatttgttgtgtggtgctccatgggttcaaaacactactattcgtgaaaacgtcttgttcggttccaagttcgatcatgttaagtacaagaaggttttggaggtctgctctttggaacatgatttgaagtctttgttggctggtgatatgaccgaaattggtgaaagaggtgttactttgtctggtggtcaaaaggctagagttaatttggctagagctgtttacgctgacaaagaagtttacttgttcgacgatattttgtccgccgttgatgctaatgttggtaagaacattaccgagaactgtttgttgggtctgttgtcctctaagaccattattatcgctacccatcagctgtccttaatttctaaagctgatagggtcgttttcttgaacggtgatggtttgatagatgtcggtactgaatctgaattgaggtccaagaacaaggattttgtcaagttgatggagtacaacaaagagttggaacaaaagaacaccgacgacgaagaacaaatcaacgataagattactaaggtcacctccattgctgataagccatctggtcctattgatggtactttattcggtgaagaagaaagggcctttgattccattccattgtccttgtacaaacaatacgttaaggctggtcaaggtatgtttggttttactgctttcccattgaccattatctgcatcatcttgtccgttttcgtcaacttgttcactaacgtttggttgtctttttgggttgcccaaaagttcaagaacttgtctaatggtcagtacatcggcttgtacgttatgtttacagttctgtctgttctgttcgttgtcgttgaattggctattatgggttacgtttttaccgaagcttctaagacgttgaacttgaaggctatgcaaaaggttttacactccccaatgtctttcattgatacaactccagtcggtaggatcatcaacagattttctaaggacaccaacagcttggataacgaaataggtatgcagctgaagttgttcttgcatttctcttccaccatcatcggcattatcattttggccattatctacttgccatggttcgctattgctgttccatttttggctattttctttttgtgcgccaccaacttctatcaagcttcttctagagaagtgaagagattggaagccattaacagatccttcgtctacaacaatttcaacgaagtcatgaacggtatgaacaccattaaggcttatggtgctggtgaaaggttcatcagaaagaatgatattttcggcgaccaattgaacgaggtttacttcgttgttgtttctaaccagagatggattgccgttaacttggatattatggctactgccgttgttttcattgtcgctatgttgtctgttaccggtcaattttcaatcaacgcttcatctgttggtctgctaacctactacatgattgaattgtcccagatgttgagcttcttgatgcaaacttactccgaagtcgaaaacgaaatgaactctgttgaaagagtttgccattacgccaacgatttggaacaagaatcagcttacagaactttggactatcagccaagaccaacttggcctgaagaaggtggtattaagtttgacaacttgtccttgaggtacagagatggtttaccattggtcttgaagaacctgtccatagatatcaaaggtggtgaaaagattggtatctgcggtagaacaggtgctggtaaatctagtttgatgatagccttgtacagaattgctgaattcgctgaaggtggcatttttatcgatggtactgatatttctaagctgggcttgcacgatttgagatccaagttgtctattatcccacaagatccagtgttgttccaaggtactattaagtccaatttggacccattcaacgaatccacagaatcagaattgtgggatgctttgagaagatctggtttgattactcccgaagaaatgatcaaaatgaaggacgagaatgagaacgagtactccaagtttcacttgaattccgttgtagaagatgagggctctaacttttcattgggtgaaagacaattattggctttggcaagagcattggtcagaaggtctaagatcttgattatggatgaagccacttcctccgttgattacaaaactgattctttggtccaagagactatcgctagagaattttctgattgcaccattttgtgcgttgcccatagattgaaaaccatcattaagtacgacaggatcttggtgttggaaaaaggtgagttggaagaatttgacaagccattggatttgttcaagaagcagggtatcttcagagatatgtgcaagatttctaacatcggtgtcgaggatttctaa

SEQ ID NO: 912 - protein, 1388 aa, Wickerhamomyces ciferrii
MSSNTSMKDEDDYQDLEKSNAHIQQPRPVKRLLTPLLTKYVPPIPQESERTRFPFYHTNIFSKALFAWLLPLLFKGYKRTLQQEDLWKLDEHTSIDHVYIKFEKHLNEEWLKFDAKHDPIKNPDAFPRFAIFMALMKTFKYEYTVAIVTKIISNALSAFTPLVSKKLISFISEKALVPDTPINKGIGYAFGITFMLMFSAIFMNQSLLHSKFVGGHSRTILTKALIQKSLIANAETRFHYPSGRIISFMSADLQRIDESLFELPTGFTTLEPIIIAIVLLIVNIGVSALAGIAIFFLTLILMGVPAGSLFKIREAANVFTDQRVGKMREVIQSMKMIKFYSWEDAYENLITGIRSKESSLVLKFQLTINVMITIAINASSITSMGAFLVLYAVKSHGNPANVFSSLSLFGILSQQVIELPMVFSSAAEGLLSLDRITKYLRSPVETFDVENFYDSELIKNDEIAVQIENGEFEWELFTEIKEDDEETKKQKKKDEKQRKKELKKSQGGNGWFNKKTKTTEDSSNDEINKESSTDEDNTNQQKPFKLSNINLKISKGEFIVVTGPIGSGKSSLLSAISAFMTKTDGKIAINGSNLLCGAPWVQNTTIRENVLFGSKFDHVKYKKVLEVCSLEHDLKSLLAGDMTEIGERGVTLSGGQKARVNLARAVYADKEVYLFDDILSAVDANVGKNITENCLLGLLSSKTIIIATHQLSLISKADRVVFLNGDGLIDVGTESELRSKNKDFVKLMEYNKELEQKNTDDEEQINDKITKVTSIADKPSGPIDGTLFGEEERAFDSIPLSLYKQYVKAGQGMFGFTAFPLTIICIILSVFVNLFTNVWLSFWVAQKFKNLSNGQYIGLYVMFTVLSVLFVVVELAIMGYVFTEASKTLNLKAMQKVLHSPMSFIDTTPVGRIINRFSKDTNSLDNEIGMQLKLFLHFSSTIIGIIILAIIYLPWFAIAVPFLAIFFLCATNFYQASSREVKRLEAINRSFVYNNFNEVMNGMNTIKAYGAGERFIRKNDIFGDQLNEVYFVVVSNQRWIAVNLDIMATAVVFIVAMLSVTGQFSINASSVGLLTYYMIELSQMLSFLMQTYSEVENEMNSVERVCHYANDLEQESAYRTLDYQPRPTWPEEGGIKFDNLSLRYRDGLPLVLKNLSIDIKGGEKIGICGRTGAGKSSLMIALYRIAEFAEGGIFIDGTDISKLGLHDLRSKLSIIPQDPVLFQGTIKSNLDPFNESTESELWDALRRSGLITPEEMIKMKDENENEYSKFHLNSVVEDEGSNFSLGERQLLALARALVRRSKILIMDEATSSVDYKTDSLVQETIAREFSDCTILCVAHRLKTIIKYDRILVLEKGELEEFDKPLDLFKKQGIFRDMCKISNIGVEDF

SEQ ID NO: 913 - DNA, 4236 bp, Cyberlindnera fabianii
  source 1..4236: mol_type = other DNA
atggccaaggatggtatcgttacttctactgaagctccattgaaagatgctgaatctggtcaattggttttggagagaagattattgacccctctgttgtctaaaaaggttccaccaattccaaccgacgaagaaagaaagttttacccattcaagaaggctaacccaatctccaaagttttcttttggtggttgaacccaatcatgaacgttggttacaagagaactttgaccccacaagatttgttcaagttgactccagatatgaccatcgatcatacctacgaaaagttcgatagatacttgaccaagatcgtcgaaaaagatagagctgctgctttgaaaaaggatccatctttaactccagaggacttggaaagaagagaatacccaaagttcgccattattaaggctttgttcttgaccttcaagtgggaatactctaccgctattatgttcaaggttttcgctgatgtttgtggtgtctgtaatcccttgttgtccaaagaattgatcaagttcgtttcccgtaagaccttgaatgctgatattgctgttaatgatggtgttggttacgctttcggttgtactttgttgttggctttctctggcatcttcattaaccagttcttgcatttgtctattactaccggtgctcattgcaagggtattttgactactgctttgctgaaaaagtccttcagagctgatgctgaaactagacataagtttacctctggtagaatcacctctttgatgtctactgatttggccagaattgatttggctatcggtttacaaccattcggttggacatttccaattccagttattattgccattgccttgttgatcgttaatatcggtgttgcttctttggctggtattgccgttttcattatctccattttggttattggtggttctgctaaggctctgttgaaaatgagaagaggtgctaacaagttcaccgacaagagaatttctttgatgagggaaatcctgcagtccatgaagatgattaagtactactcttgggaagatgcctacgaatcttctgttgttgaacagagaaattccgaagttggtgtcatcttgaagatgcagtctatcagaaacttcttgctggccttctctatttctttgccatctttcacttccatgatcgctttcttggtcttgtacggtatttcctctaatagaaacccagccaacatcttcccttccatttctttgtttggttccttggctcaacaaaccatgatgttgccaatggctttggctactggtactgatgctatgattggtttgaatagagtcagggaattcttgcaatctggtgttgatttggaagatcctgaagcaccacaaggtaatgatcaagattctcaagatgccaacgttgaaaagttgccagaagatgtagctttgtctgttaagaacgctaccttcatttgggaaacctttgatgatgaagaggatgaaggtgctgataagccaaaagctgatactgctactgaaaagaaggattccgatattgctactccagctacttctaccaaagatacccattctgattccgaattgaagaacactgcttcttctaccgaagaagaaggtcacgaatcttacactaagtctgttttcgaaggtttccacaacatcaacttggatgttaagaagggtgaattcgttattgtcactggtgctattggttccggtaaatcctctttgttgattgctttagctggtttcatgaagcaaactggtggtactttaactgctgctgaagatgttttgttgtgtggtgctccatgggttcaaaacactactgttagagaaaacatcaccttcggtttgccatacgaagaggaaagatacgaaagggttattgatgcttgtgccttgagagatgatttgaagttgtttgccggtggtgatttgactgaaattggtgaaagaggtatcactttgtctggtggtcaaaaggctagaatcaatttggctagagctgtttacgctgataagtccatcgttttgttcgatgatgttctgtctgctgttgatgctagagttggtaagcacattattgatgactgtttcggtgagtacatgaagggtaagactagagttttagctacccaccaattgtccttggttgataaggctgatagagtcgtctttttgaatggtgatggtacattgcatatcggtactgttgaagagttgttgacttccaatgaaggcttcatcaagctgatggaattctccaagaaatcctccgaagatgacgaagaagaggacgaggatattgatgaagaagaacaagaaattatcgccctgcaaaagtctcaatccttggctgttattcagtccaaaaagaacaacaatgatgctgctgctggtgttttggttaacgaggaagaaagagccaaaaacaagatctcctctaaggtttacaccgagtatttgagagaaggtggtggtattttgggtaaatttgctgctccaattgccatcctgttgctgattttggatgttttcactaccattttcatcaacgtctggttgtctttctggattacttacaagtggaagaacagatccgatggtttctacatcggtttctacgttatgttcgttgtcctgaatatctgcttcattgcctcttgtttcgtcttgttgggttacatttctactacctctgctagggaattgaacttgaaagctatgagaagaatcttgcatgctcctatggcttatttggatgtaactccaatgggcagaattttgaacagattcactaaggataccgacgtcttggataatgaattgggtgaacaattgaggttgttcttgcacccaactgcttttgttatcggtgtcattattctgtgcatcatctacttgccatggttcgctttagttattccaccattattggtcgttttctcttgcgttacctcttactaccaatcctcatctagagaagtcaagagattggaagctgttcaaaggtctttcgtctacaacaatttcaacgaagtgttgaacggtatgtctaccttgaaggcttatagagctacctctaggttcctgaagaaaaacaacgtttccgttgacagaatgaacgaagcttacttcgttgttatcgccaatcagagatggatctccattcatatggatatggttgctgtttgcttgttgtttgttgtagctatgttggccgttaccagacaattttctatttctgctgcttctgcaggtttggttgttacttacgttatgcaaataggtggcctgatgtccttgattatgagagcttatacaaccgtcgaaaacgagatgaattccgttgaaagattgtgccaatacgccaacgatttggttcaagaaaaaccatacaggatcaacgagacaaaaccatctccatcttggcctgaatcaggttctattgaattcgaaggtgtctccttgagatatagagatggcttgccattggtcttgagaaatttgactttggctgttgctggtggtgagaagattggtatttgtggtagaactggtgctggtaagtcatctattatgactgccttgtacaggttgtctgaattggctgaaggtaggattttgattgatggtttggacatctctaagatgggtttgttcgaattgaggtccaagttgtccattattccacaagatccagttttgttccagggcactattagaagaaacttggatccatttggtgaatccgatgatcaacatttgtgggattctttgcgtagagctggtttgatcgattcttctgttttggctacaatcaaggcccaaggtaaagaagataagaacttccataagttccacttggatcaagctgtagaagatgatggttctaacttcagtttgggtgaaagacaattattggcattggcaagagctttggtcagaaactccagaatattgatcttggatgaagccacttcctccgttgattacgaaacagatgctaagattcagagcaccatcaagtctgaattctctgaatgtacgatcttgtgcattgcccatagactgaaaaccattttggattacgacaagatcttagtcttggaagccggtgaaatcgaagaatttggtactccaatgaccttgtacgaaaacgacggtattttcagacaaatgtgcgatagatccgatatcactagggaagattttgttcacgacctgtga

SEQ ID NO: 914 - protein, 1411 aa, Cyberlindnera fabianii
MAKDGIVTSTEAPLKDAESGQLVLERRLLTPLLSKKVPPIPTDEERKFYPFKKANPISKVFFWWLNPIMNVGYKRTLTPQDLFKLTPDMTIDHTYEKFDRYLTKIVEKDRAAALKKDPSLTPEDLERREYPKFAIIKALFLTFKWEYSTAIMFKVFADVCGVCNPLLSKELIKFVSRKTLNADIAVNDGVGYAFGCTLLLAFSGIFINQFLHLSITTGAHCKGILTTALLKKSFRADAETRHKFTSGRITSLMSTDLARIDLAIGLQPFGWTFPIPVIIAIALLIVNIGVASLAGIAVFIISILVIGGSAKALLKMRRGANKFTDKRISLMREILQSMKMIKYYSWEDAYESSVVEQRNSEVGVILKMQSIRNFLLAFSISLPSFTSMIAFLVLYGISSNRNPANIFPSISLFGSLAQQTMMLPMALATGTDAMIGLNRVREFLQSGVDLEDPEAPQGNDQDSQDANVEKLPEDVALSVKNATFIWETFDDEEDEGADKPKADTATEKKDSDIATPATSTKDTHSDSELKNTASSTEEEGHESYTKSVFEGFHNINLDVKKGEFVIVTGAIGSGKSSLLIALAGFMKQTGGTLTAAEDVLLCGAPWVQNTTVRENITFGLPYEEERYERVIDACALRDDLKLFAGGDLTEIGERGITLSGGQKARINLARAVYADKSIVLFDDVLSAVDARVGKHIIDDCFGEYMKGKTRVLATHQLSLVDKADRVVFLNGDGTLHIGTVEELLTSNEGFIKLMEFSKKSSEDDEEEDEDIDEEEQEIIALQKSQSLAVIQSKKNNNDAAAGVLVNEEERAKNKISSKVYTEYLREGGGILGKFAAPIAILLLILDVFTTIFINVWLSFWITYKWKNRSDGFYIGFYVMFVVLNICFIASCFVLLGYISTTSARELNLKAMRRILHAPMAYLDVTPMGRILNRFTKDTDVLDNELGEQLRLFLHPTAFVIGVIILCIIYLPWFALVIPPLLVVFSCVTSYYQSSSREVKRLEAVQRSFVYNNFNEVLNGMSTLKAYRATSRFLKKNNVSVDRMNEAYFVVIANQRWISIHMDMVAVCLLFVVAMLAVTRQFSISAASAGLVVTYVMQIGGLMSLIMRAYTTVENEMNSVERLCQYANDLVQEKPYRINETKPSPSWPESGSIEFEGVSLRYRDGLPLVLRNLTLAVAGGEKIGICGRTGAGKSSIMTALYRLSELAEGRILIDGLDISKMGLFELRSKLSIIPQDPVLFQGTIRRNLDPFGESDDQHLWDSLRRAGLIDSSVLATIKAQGKEDKNFHKFHLDQAVEDDGSNFSLGERQLLALARALVRNSRILILDEATSSVDYETDAKIQSTIKSEFSECTILCIAHRLKTILDYDKILVLEAGEIEEFGTPMTLYENDGIFRQMCDRSDITREDFVHDL

SEQ ID NO: 915 - DNA, 4536 bp, Saccharomyces cerevisiae
  source 1..4536: mol_type = other DNA
atgcccgaggccaagcttaacaataacgtcaacgacgttactagctactcctccgcgtcttcttctactgaaaacgctgctgatctacacaattataatgggttcgatgagcatacagaagctcgaatccaaaaactggcaaggactctgaccgcacagagtatgcaaaactccactcaatcggcacccaacaaaagtgatgctcagtctatattttctagcggtgtggaaggtgtaaacccgatattctctgatcctgaagctccaggctatgacccaaaattggaccccaactccgaaaatttttctagtgccgcctgggttaagaatatggctcacctaagtgcggcagaccctgacttttataagccttattccttaggttgcgcttggaagaacttaagtgcttctggtgcttccgcagatgtcgcctatcagtcaactgtggttaatattccatacaaaatcctaaaaagtgggctgagaaagtttcaacgttctaaagaaaccaatactttccaaatcttgaaaccaatggatggttgcctaaacccaggtgaattgctagtcgttttaggtagaccaggctctggctgtactactttattaaaatccatctcttcaaatactcatggttttgatcttggtgcagatactaaaatttcttacagcggctactcaggtgatgatattaagaaacattttcgtggtgaagttgtttacaacgcagaagctgatgtacatctgcctcatttaacagtcttcgaaactttggttacagtagcgaggttgaaaaccccacagaaccgtatcaagggtgtcgatagggaaagttatgcgaatcatttggcggaagtagcaatggcaacgtacggtttatcgcatacaaggaatacaaaagttggtaacgacatcgtcagaggtgtttccggtggtgaaaggaagcgtgtctccattgctgaagtctccatctgtggatccaaatttcaatgctgggataatgctacaaggggtttggattccgctaccgctttggaatttattcgtgccttaaagactcaagctgatatttccaatacatctgccacagtggccatctatcaatgttctcaagatgcgtacgacttgttcaataaagtctgtgttttggatgatggttatcagatctactatggccccgccgataaggccaagaagtactttgaagatatggggtatgtttgtccaagcagacaaaccaccgcagattttttgacctcagttacaagtccctctgagagaaccctgaacaaagatatgctaaaaaaaggtattcatataccacagaccccgaaggaaatgaacgattactgggtaaaatctccaaattacaaagagctaatgaaagaagtcgaccaacgattattgaatgacgatgaagcaagccgtgaagctattaaggaagcccacattgctaagcagtccaagagagcaagaccttcctctccttatactgtcagctacatgatgcaagttaaatacctattaatcagaaatatgtggagactgcgaaataatatcgggtttacattatttatgattttgggtaactgtagtatggctttaatcttgggttcaatgtttttcaagatcatgaaaaagggtgatacttctacattctatttccgtggttctgctatgttttttgcaattctattcaatgcattttcttctctgttagaaatcttttcgttatatgaggccagaccaatcactgaaaaacatagaacatattcgttataccatccaagtgctgacgcttttgcatcagttctatcagaaataccctcaaagttaatcatcgctgtttgcttcaatataatcttctatttcttagtagactttagaagaaatggtggtgtattctttttctacttattaataaacattgtcgcggttttctccatgtctcacttgtttagatgtgttggttccttaacaaagacattgtcagaagctatggttcccgcttctatgttattgttggctctatccatgtataccggttttgctattcctaagaagaagatcctacgttggtctaaatggatttggtatatcaatccgttggcttacttattcgaatctttgttaattaacgagtttcatggtataaaattcccctgcgctgaatatgttcctcgtggtcctgcgtatgcaaacatttctagtacagaatctgtttgtaccgtggttggagctgttccaggccaagactatgttctgggtgatgatttcattagaggaacttatcaatactaccacaaagacaaatggcgtggtttcggtattggtatggcttatgtcgtcttctttttctttgtctatctattcttatgtgaatacaacgagggtgctaaacaaaaaggtgaaatattagttttcccacgcagtatagttaaaagaatgaagaaaagaggtgtactaactgaaaagaatgcaaatgaccccgaaaacgttggggaacgtagtgacttatccagcgataggaaaatgctacaagaaagctctgaagaggaatccgatacttacggagaaattggtttatccaagtcagaggctatatttcactggagaaacctttgttacgaagttcagattaaggccgaaacaagacgtattttgaacaatgttgatggttgggttaaaccaggtactttaacagctttaatgggtgcttcaggtgctggtaaaaccacacttctggattgtttggccgaaagggttaccatgggtgttataactggtgatatcttggtcaatggtattccccgtgataaatctttcccaagatccattggttattgtcagcaacaagatttgcatttgaaaactgccactgtgagggagtcattgagattttctgcttacctacgtcaaccagctgaagtttccattgaagaaaagaacagatatgttgaagaagttattaaaattcttgaaatggaaaaatatgctgatgctgttgttggtgttgctggtgaaggtttaaacgttgaacaaagaaaaagattaaccattggtgttgaattaactgccaaaccaaaactgttggtctttttagatgaacctacttctggtttggattctcaaactgcttggtctatttgtcagctaatgaaaaagttggcaaatcatggtcaagcaattctatgtactattcaccaaccctctgctattttgatgcaagaattcgatcgtttactatttatgcaacgtggtggtaagactgtctactttggcgacttgggcgaaggttgtaaaactatgatcgattattttgaaagccatggtgctcataaatgccctgctgacgccaacccagctgaatggatgctagaagttgttggtgcagctccaggctctcatgcaaatcaagattattacgaagtttggaggaattctgaagagtacagggccgttcaatctgaattagattggatggaaagagaattaccaaagaaaggttcgataactgcagctgaggacaaacacgaattttcacaatcaattatttatcaaacaaaattggtcagtattcgtctattccagcaatattggagatctccagattatttatggtcgaagtttattttaactattttcaatcaattgttcatcggtttcactttcttcaaagcaggaacctcgctacagggtttacaaaatcaaatgttggctgtgttcatgtttacggttattttcaatcctattctacaacaatacctaccatcttttgtccagcaaagagatttgtatgaggccagggaacgcccctcaaggactttttcttggatttcatttatcttcgctcaaatattcgtggaagttccatggaatatattggcaggtactattgcttattttatctactattatccaattggattttactccaacgcgtctgcagctggccagttgcatgaaaggggtgctttattttggttgttctcttgtgctttctacgtttatgttggttctatgggtctgcttgtcatttcattcaaccaagttgcagaaagtgcagctaacttagcctctttgttgtttacaatgtctttgtctttttgtggtgttatgactaccccaagtgccatgcctagattttggatattcatgtacagggtttcacctttgacttatttcattcaggctctgttggctgttggtgttgctaacgtagacgtcaaatgcgctgattacgaattgctagaattcacaccaccatccggtatgacatgtgggcagtacatggaaccatatttacaactagcaaagactggttacttaactgatgaaaatgccactgacacctgtagtttctgtcaaatatctacaaccaatgattacttagctaatgtcaattctttctacagtgagagatggagaaattatggtatcttcatctgttatattgcattcaattatatcgctggtgtctttttctactggttagcaagagtgcctaaaaagaacggtaaactctccaagaaataa

SEQ ID NO: 916 - protein, 1511 aa, Saccharomyces cerevisiae
MPEAKLNNNVNDVTSYSSASSSTENAADLHNYNGFDEHTEARIQKLARTLTAQSMQNSTQSAPNKSDAQSIFSSGVEGVNPIFSDPEAPGYDPKLDPNSENFSSAAWVKNMAHLSAADPDFYKPYSLGCAWKNLSASGASADVAYQSTVVNIPYKILKSGLRKFQRSKETNTFQILKPMDGCLNPGELLVVLGRPGSGCTTLLKSISSNTHGFDLGADTKISYSGYSGDDIKKHFRGEVVYNAEADVHLPHLTVFETLVTVARLKTPQNRIKGVDRESYANHLAEVAMATYGLSHTRNTKVGNDIVRGVSGGERKRVSIAEVSICGSKFQCWDNATRGLDSATALEFIRALKTQADISNTSATVAIYQCSQDAYDLFNKVCVLDDGYQIYYGPADKAKKYFEDMGYVCPSRQTTADFLTSVTSPSERTLNKDMLKKGIHIPQTPKEMNDYWVKSPNYKELMKEVDQRLLNDDEASREAIKEAHIAKQSKRARPSSPYTVSYMMQVKYLLIRNMWRLRNNIGFTLFMILGNCSMALILGSMFFKIMKKGDTSTFYFRGSAMFFAILFNAFSSLLEIFSLYEARPITEKHRTYSLYHPSADAFASVLSEIPSKLIIAVCFNIIFYFLVDFRRNGGVFFFYLLINIVAVFSMSHLFRCVGSLTKTLSEAMVPASMLLLALSMYTGFAIPKKKILRWSKWIWYINPLAYLFESLLINEFHGIKFPCAEYVPRGPAYANISSTESVCTVVGAVPGQDYVLGDDFIRGTYQYYHKDKWRGFGIGMAYVVFFFFVYLFLCEYNEGAKQKGEILVFPRSIVKRMKKRGVLTEKNANDPENVGERSDLSSDRKMLQESSEEESDTYGEIGLSKSEAIFHWRNLCYEVQIKAETRRILNNVDGWVKPGTLTALMGASGAGKTTLLDCLAERVTMGVITGDILVNGIPRDKSFPRSIGYCQQQDLHLKTATVRESLRFSAYLRQPAEVSIEEKNRYVEEVIKILEMEKYADAVVGVAGEGLNVEQRKRLTIGVELTAKPKLLVFLDEPTSGLDSQTAWSICQLMKKLANHGQAILCTIHQPSAILMQEFDRLLFMQRGGKTVYFGDLGEGCKTMIDYFESHGAHKCPADANPAEWMLEVVGAAPGSHANQDYYEVWRNSEEYRAVQSELDWMERELPKKGSITAAEDKHEFSQSIIYQTKLVSIRLFQQYWRSPDYLWSKFILTIFNQLFIGFTFFKAGTSLQGLQNQMLAVFMFTVIFNPILQQYLPSFVQQRDLYEARERPSRTFSWISFIFAQIFVEVPWNILAGTIAYFIYYYPIGFYSNASAAGQLHERGALFWLFSCAFYVYVGSMGLLVISFNQVAESAANLASLLFTMSLSFCGVMTTPSAMPRFWIFMYRVSPLTYFIQALLAVGVANVDVKCADYELLEFTPPSGMTCGQYMEPYLQLAKTGYLTDENATDTCSFCQISTTNDYLANVNSFYSERWRNYGIFICYIAFNYIAGVFFYWLARVPKKNGKLSKK

SEQ ID NO: 917 - DNA, 4587 bp, Mus musculus
  source 1..4587: mol_type = other DNA
atggccttgagatctttctgttctgctgatggttctgatccattgtgggattggaatgttacttggcatacttctaatccagatttcaccaagtgtttccaaaacaccgttttgacttgggttccatgtttttacttgtggtcttgctttcccttgtacttcttctacttgtccagacatgatagaggttacatccaaatgacccatttgaacaagactaagactgctttgggtttcttcttgtggattatttgttgggccgatctgttttactctttctgggaaagatcacagggtgttttgagagcaccagttttgttggtttctccaactttgttgggtatcactatgttgttggctaccttcttgattcagttggagagaagaaaaggtgtccaatcctctggtattatgttgactttttggttggttgctttgttgtgcgctttggctattttgagatccaagattatttccgccttgaaaaaggatgcccacgttgatgtttttagagactctaccttctacctgtacttcaccttggttttggttcaattggttctgtcttgtttctctgattgctctcctttgttctctgaaaccgttcatgatagaaatccctgtccagaatcttctgcttcattcttgtctagaattaccttctggtggatcactggtatgatggttcatggttatagacaacccttggaatcttcagatttgtggtccttgaacaaagaagatacctccgaagaagttgttccagttttggttaacaactggaagaaagaatgcgacaagtccagaaaacaaccagttagaatagtttacgctccaccaaaagatccatctaagccaaaaggttcttcccaattggatgttaacgaagaagtcgaagctttgatcgttaagtctccacataaggatagagagccctctttgtttaaggtgttgtacaaaactttcggcccctactttttgatgtccttcttgtataaggccttgcacgatttgatgatgtttgctggtccaaagatcttggagctgattattaacttcgtcaacgatagagaagctccagattggcaaggttatttctatactgccttgttgtttgtttccgcttgcttgcaaactttggcattgcatcaatacttccacatctgtttcgtttccggtatgagaatcaaaactgctgttgttggtgctgtttacagaaaggctttgttgattactaatgccgccagaaaatcttctactgtcggtgaaatagtcaacttgatgtctgttgatgcccaaagattcatggatttggccacttacattaacatgatttggtctgctccattgcaagttattctggccttgtatttcttgtggttgtctttgggtccatcagttttggctggtgttgctgttatgattttgatggttccattgaacgctgttatggctatgaaaactaagacctaccaagttgcccatatgaagtctaaggataacaggatcaaactgatgaacgagatcttgaacggtatcaaggttttgaagttgtacgcttgggaattagccttccaagataaggtcatgtctatcaggcaagaagaattgaaggtcttgaagaagtctgcttatttggctgcagttggtacttttacttgggtgtgtactccattcttggttgccttgtctacttttgctgttttcgttactgttgacgagagaaacattttggatgctaagaaggctttcgtttctttggccttgttcaacatcttgagattcccattgaacatcttgccaatggtcatctcttctatcgttcaagcttctgtctctttgaagagattgaggatcttcttgtcccacgaagaattggaaccagattctatcgaaagaaggtccattaagtctggtgaaggtaactctattaccgttaagaacgctactttcacatgggctagaggtgaaccaccaactttgaatggtattactttctccattccagaaggtgctttagttgcagttgttggtcaagttggttgtggtaaatcatctttgttgtctgctttattggccgaaatggataaggttgaaggtcacgttactttgaaaggttctgttgcttatgttccacaacaagcctggattcaaaacgattctttgagggaaaacatcttgttcggtcacccattacaagagaattactacaaagcagttatggaagcttgcgctttgttgccagatttggaaattttgccatctggtgatagaaccgaaattggtgaaaagggtgttaatttgtctggtggtcaaaagcagagagtttctttagctagagctgtctactctaactccgatatctatttgtttgacgacccattgtctgcagttgatgcacatgttggtaagcacatctttgaaaaagttgtaggtccaatgggcctgttgaagaacaaaactagaattttggttacccacggcatctcttatttgccacaagttgatgttatcatcgtcatgtccggtggtaagatttctgaaatgggttcctaccaagagttgttggatagagatggtgcttttgctgaattcttgagaacttacgctaacgctgaacaagatttggcttctgaagatgattctgtttccggttctggtaaagaatccaagccagttgaaaatggtatgttggttactgatacagtcggtaagcacttgcaaagacatttgtctaactcctcttctcattccggtgatacttctcaacaacattcctctattgccgaattgcaaaaagctggtgctaaagaagagacttggaaattgatggaagctgataaggctcaaacaggtcaagttcaattgtctgtttactggaactacatgaaggccattggtttgttcatcacgttcttgtccattttcttgttcttgtgcaaccatgtttctgctttggcttcaaattactggttgtcattgtggactgatgatccacctgttgttaatggtactcaagccaatagaaacttcaggttgtcagtttatggtgccttgggtattttacaaggtgctgctattttcggttactccatggctgtttctatcggtggtatttttgcttccagaagattgcacttggacttgttgtataacgtgttgagatctccaatgagcttctttgaaagaactccatctggtaacttggtcaacaggttctccaaagaattagataccgttgactccatgattccacaagtcatcaaaatgttcatgggcagcttgttttcagttattggtgccgttattatcatcttgttggcaactccaattgccgctgttattattccaccattgggtctagtttactttttcgtccagagattctacgttgcctcatctaggcaattgaaaagattggaatccgtgtctagatccccagtttactctcattttaacgaaaccttgttgggtgtctccgttattagagcttttgaggaacaagagagattcatccaccaatccgatttgaaggttgacgaaaatcaaaaggcttactacccatctattgtcgctaacagatggttggctgttagattagaatgtgttggtaactgcatcgttttgttcgctgctttgtttgctgtcatctctagacattctttgtctgctggtttagttggtttgtccgtttcttactccttgcaaattaccgcttacttgaactggttggtcagaatgtcatcagaaatggaaactaacatcgttgccgtcgaaaggttgaaagaatactccgaaactgaaaaagaagccccttggcaaattcaagaaactgctccaccatctacttggccacattctggtagagttgaattcagagattactgcttgagatacagggaagatctggatttggttctaaagcacattaacgttaccatcgaaggtggtgaaaaagtcggtatagttggtagaacaggtgctggtaaatcttcattgacattgggtttgtttaggatcaacgaatctgctgaaggtgaaatcattatcgacggtgttaacattgctaagatcggcttgcataatctgagattcaagatcactatcatcccacaagatcccgttttattctctggttctttgagaatgaacttggacccattctctcaatactctgatgaagaggtttggatggctttggaattggctcatttgaagggttttgtttcagctttgccagataagttgaaccatgaatgtgcagaaggcggagaaaatttgtcagtaggtcaaagacaattggtttgcttggctagagctttgttaagaaagaccaaaatcctggtcttggatgaagctactgctgctgttgacttagaaaccgataacttgatccaatccaccatcagaactcaatttgaggattgcactgttttgaccattgctcatagattgaacaccatcatggattacaccagagttatcgttttggacaagggtgaagttagagaatgtggtgctccatctgaactattgcaacagagaggtattttctactctatggctaaagatgccggtttggtttga

SEQ ID NO: 918 - protein, 1528 aa, Mus musculus
MALRSFCSADGSDPLWDWNVTWHTSNPDFTKCFQNTVLTWVPCFYLWSCFPLYFFYLSRHDRGYIQMTHLNKTKTALGFFLWIICWADLFYSFWERSQGVLRAPVLLVSPTLLGITMLLATFLIQLERRKGVQSSGIMLTFWLVALLCALAILRSKIISALKKDAHVDVFRDSTFYLYFTLVLVQLVLSCFSDCSPLFSETVHDRNPCPESSASFLSRITFWWITGMMVHGYRQPLESSDLWSLNKEDTSEEVVPVLVNNWKKECDKSRKQPVRIVYAPPKDPSKPKGSSQLDVNEEVEALIVKSPHKDREPSLFKVLYKTFGPYFLMSFLYKALHDLMMFAGPKILELIINFVNDREAPDWQGYFYTALLFVSACLQTLALHQYFHICFVSGMRIKTAVVGAVYRKALLITNAARKSSTVGEIVNLMSVDAQRFMDLATYINMIWSAPLQVILALYFLWLSLGPSVLAGVAVMILMVPLNAVMAMKTKTYQVAHMKSKDNRIKLMNEILNGIKVLKLYAWELAFQDKVMSIRQEELKVLKKSAYLAAVGTFTWVCTPFLVALSTFAVFVTVDERNILDAKKAFVSLALFNILRFPLNILPMVISSIVQASVSLKRLRIFLSHEELEPDSIERRSIKSGEGNSITVKNATFTWARGEPPTLNGITFSIPEGALVAVVGQVGCGKSSLLSALLAEMDKVEGHVTLKGSVAYVPQQAWIQNDSLRENILFGHPLQENYYKAVMEACALLPDLEILPSGDRTEIGEKGVNLSGGQKQRVSLARAVYSNSDIYLFDDPLSAVDAHVGKHIFEKVVGPMGLLKNKTRILVTHGISYLPQVDVIIVMSGGKISEMGSYQELLDRDGAFAEFLRTYANAEQDLASEDDSVSGSGKESKPVENGMLVTDTVGKHLQRHLSNSSSHSGDTSQQHSSIAELQKAGAKEETWKLMEADKAQTGQVQLSVYWNYMKAIGLFITFLSIFLFLCNHVSALASNYWLSLWTDDPPVVNGTQANRNFRLSVYGALGILQGAAIFGYSMAVSIGGIFASRRLHLDLLYNVLRSPMSFFERTPSGNLVNRFSKELDTVDSMIPQVIKMFMGSLFSVIGAVIIILLATPIAAVIIPPLGLVYFFVQRFYVASSRQLKRLESVSRSPVYSHFNETLLGVSVIRAFEEQERFIHQSDLKVDENQKAYYPSIVANRWLAVRLECVGNCIVLFAALFAVISRHSLSAGLVGLSVSYSLQITAYLNWLVRMSSEMETNIVAVERLKEYSETEKEAPWQIQETAPPSTWPHSGRVEFRDYCLRYREDLDLVLKHINVTIEGGEKVGIVGRTGAGKSSLTLGLFRINESAEGEIIIDGVNIAKIGLHNLRFKITIIPQDPVLFSGSLRMNLDPFSQYSDEEVWMALELAHLKGFVSALPDKLNHECAEGGENLSVGQRQLVCLARALLRKTKILVLDEATAAVDLETDNLIQSTIRTQFEDCTVLTIAHRLNTIMDYTRVIVLDKGEVRECGAPSELLQQRGIFYSMAKDAGLV

SEQ ID NO: 919 - DNA, 4041 bp, Ogataea philodendri
  source 1..4041: mol_type = other DNA
atgaacgttgaagccgccaacgaaaaagaattgctattgcaaaagaggtccctgactttcttgtacggtaaaaatgttccaccattgccattggaagaagagagaaaagtttttccacataggcacaccaacattatctctagagctttgttctactacttgaacccaatgttgagagtcggttacaaaagaacattgcaaccacaagatatgtacgtcttggatgaacgtgattctgttgatgctatgtacgacaagttcagaaactacttggatgtcgaattggataaggctagagccaaacatatccaaaagaaaagagaagctagagccgaattgggtaacacttctactgttgatgaagataccgacttggaagatttcgaattgccttacatcgttatcgtcaagggtttgtttcatttgtttggttggcagtatatgtggggctctttgttgaaagttttcaccgatttgttttacaccctgatgccattggttcaaaagagattggttaacttcgttgaagaatccgcttacggtttccatccaactttaggtaaaggtgttggttactctattggtgtcggtttgatggtttatttcgctggtttgtgtgttaaccacttcgtctacaactctattactgttggtgctaagtgtaaggctgttttgactaagttgttgttggagaagtccttcagattggatgctagaggtaaacataagttcccagttggtaagatcaactccattatgggtactgatttgaccagagttgatttggctattggtttcttcccaatcatcttcgaattcccattctccattatcctgtgcatcatcctgttgttggttaacattggtgtttctgctttggccggtatttccttgttcgttgttattttgttgttcacctcctacgttgtcagggtcttgtacaaaatgagagttagagctaacgtttacaccgaccaaagagttaatttggtcaaagagctgctgaagaacttcaagatggttaagatgtacggttgggagaactcttacttcaagcaatttgttgacaccaggcagaaagaaatgaccatcgttttgagaatgcagcacatcagaaactttttggacgctttgtctttctggttgccaattattacctccatggtttctttcttggtgttgtaccatttgaggaacaacagaacagttggtgacatcttctcttcattgaccttgttccaagaattgactggtcaatttgctatggttaccccatctttgtctatggctactgatatggttgtcggttttaagagagttgcccaattgatttcttgtccagatgctccagctttggaagaatttcatgatttgttggacgacgaaaagttggctttgaaattggctcatgcttctttcaagtggcataccttcgaagaatctgctactactgaagttgttatcgtcccagaatctaagacctcttcatctaaagatgcttccagaactgaatttccaggcttgcatgatttgacgttgtctatttctagaggtgaattcatcgttgttaccggtgcaattggttctggtaaatcttctttgttgtccgccatttctggtttcatgccaaaaactggtggttctgttgctaagaacggtagtttgttgttgtgtggttatccatgggtccaaaatgctactgttagagagaatatcttgttcggtcaaccattcgaccaaactaagtatgacgaaatcgttagagtttgctccttggatactgatttcgagttgttttctgctggtgatatgaccgaagttggtgaaagaggtattactttgtctggtggtcaaaaggctagaatcaatttggctagagctgtttactccgatagagacatcattttgttggatgatgttttgtctgctgttgacgctaaggttggtaaacacattatggaacaatgcatcttgggttacttgaagggtaagactagaattttggctacccaccaattgtccttgattaacgctgctgataaggtcattttcttgaatggtaacggttccatcgattacggtacattgcatgaagttagatccagaaactccgccttcattagattgatggaattctctcatgaccccgaagaggaacaaagaccagatgaagctgacgaaaagaaagaggatgaattgaaggctgaaaaagaagaggacggtaaattgatgagagatgaagaaagagccgtcaactctatctctaagaatgtttactctacctacatcttgtccggttcaggtaaattgggttatttgttcccaatcctgattttgttcgcttgtgctgtttctaccttctctgatttgttcactaacaactggttgtccttctggcaagataagaagtttagaaagccaccaggtttctaccaaggcatctatattttgttaggcttctccaccttgctgttgttgactttttacttcgctttgatcgtccagttctgtaacaaagctgctaatcaattcaacacctccgctttccaaaatttgttgcatgctccaatgtccttcattgatacaactccaatgggtagagtcttgaacagattcactaaggattccgatgttttggacaacgagatccaatctcaattcaggatgttcattcaagagttttccgttgttgtcggcaccttgattttgtgcattatctatttgccatggttcgctattgccattccagttatgatagttgcctattacttgatcgccaacttctacttggcttcctctagagaaatcaaaagattggaagccgtcaagagatccgaagtttattctcattttaacgaggccttgtctggtttggatacaatcaaagctcattccagctctgaaaggttcatggaaactaactccagattgatcgaccaaatgaacgaatcctacttcactttcgttgctgttcaaagatggttggcttgcaacttggatatcatggtttccttcatgtgcttgttcatctgcctgttgtgttccttcagaatcttccatattagaggtgcttatgctggtttgctattgacctgtgtttttaacatcgtcggcatgttgtcttacatgttaagagccatgaccgaaatcgagaatcaaatgaactctgtcgaaaggttgaagttttacgctgtcgacttagaacaagaagccccatttgatatccctgaaagaaatccatctccattgtggcctcaaagaggtgctatttgtttttctaacgtcaccatgtcctatagagaaggtttgccaccagctgttagaaacttgtctttggatgttgccggtggtgaaaagataggtgtttgtggtagaactggtgcaggtaaatcatccgttatgtacagcttgtttagattggctgaattcgatggtagaatcaccattgatgatgtggacatttctaaaatcggcttgcacaagttgagaacctcattgtctattatcccacaagatccagttttgttctccggtaatatcaggtctaatttggaccctttccaagaacactctgatgataatttgtgggatgctttgtctaaagccggtttggttgaaactgatgctttggatttggttaagcaccagactaagtctgataggaacttgcataagtttcacttggccagattggttgaagatgatggttctaatttctccttgggtgaacgtcaattattggctttggcaagagctttggttagaggttctaagatcttggttttggatgaagctacttcctccgttgattacgaaacagatgctaaagtccaaaagaccatcactaatgaattcgctgattgcaccgttttgtgtattgcccatagattgaaaaccatcgtcaagtacgataggattatggtcttggacaaaggtgaaatcgtcgaattaggtaagccaatcgaactgtatcaacacgacggtatttttaggtctatgtgcgaaaagtccggtattactagagctgacttcgatatctga

SEQ ID NO: 920 - protein, 1346 aa, Ogataea philodendri
MNVEAANEKELLLQKRSLTFLYGKNVPPLPLEEERKVFPHRHTNIISRALFYYLNPMLRVGYKRTLQPQDMYVLDERDSVDAMYDKFRNYLDVELDKARAKHIQKKREARAELGNTSTVDEDTDLEDFELPYIVIVKGLFHLFGWQYMWGSLLKVFTDLFYTLMPLVQKRLVNFVEESAYGFHPTLGKGVGYSIGVGLMVYFAGLCVNHFVYNSITVGAKCKAVLTKLLLEKSFRLDARGKHKFPVGKINSIMGTDLTRVDLAIGFFPIIFEFPFSIILCIILLLVNIGVSALAGISLFVVILLFTSYVVRVLYKMRVRANVYTDQRVNLVKELLKNFKMVKMYGWENSYFKQFVDTRQKEMTIVLRMQHIRNFLDALSFWLPIITSMVSFLVLYHLRNNRTVGDIFSSLTLFQELTGQFAMVTPSLSMATDMVVGFKRVAQLISCPDAPALEEFHDLLDDEKLALKLAHASFKWHTFEESATTEVVIVPESKTSSSKDASRTEFPGLHDLTLSISRGEFIVVTGAIGSGKSSLLSAISGFMPKTGGSVAKNGSLLLCGYPWVQNATVRENILFGQPFDQTKYDEIVRVCSLDTDFELFSAGDMTEVGERGITLSGGQKARINLARAVYSDRDIILLDDVLSAVDAKVGKHIMEQCILGYLKGKTRILATHQLSLINAADKVIFLNGNGSIDYGTLHEVRSRNSAFIRLMEFSHDPEEEQRPDEADEKKEDELKAEKEEDGKLMRDEERAVNSISKNVYSTYILSGSGKLGYLFPILILFACAVSTFSDLFTNNWLSFWQDKKFRKPPGFYQGIYILLGFSTLLLLTFYFALIVQFCNKAANQFNTSAFQNLLHAPMSFIDTTPMGRVLNRFTKDSDVLDNEIQSQFRMFIQEFSVVVGTLILCIIYLPWFAIAIPVMIVAYYLIANFYLASSREIKRLEAVKRSEVYSHFNEALSGLDTIKAHSSSERFMETNSRLIDQMNESYFTFVAVQRWLACNLDIMVSFMCLFICLLCSFRIFHIRGAYAGLLLTCVFNIVGMLSYMLRAMTEIENQMNSVERLKFYAVDLEQEAPFDIPERNPSPLWPQRGAICFSNVTMSYREGLPPAVRNLSLDVAGGEKIGVCGRTGAGKSSVMYSLFRLAEFDGRITIDDVDISKIGLHKLRTSLSIIPQDPVLFSGNIRSNLDPFQEHSDDNLWDALSKAGLVETDALDLVKHQTKSDRNLHKFHLARLVEDDGSNFSLGERQLLALARALVRGSKILVLDEATSSVDYETDAKVQKTITNEFADCTVLCIAHRLKTIVKYDRIMVLDKGEIVELGKPIELYQHDGIFRSMCEKSGITRADFDI

SEQ ID NO: 921 - DNA, 2139 bp, Capra hircus
  source 1..2139: mol_type = other DNA
atggacacctcctccaaagaaaacatcaggttgttttccaagaactccatgcaaccagttggtagattgtctttcaaaactgagtacccatcctctgaagaaaagcaaccatgttgttgtcagctgaaagttttcttgggtgctttgtcttttgtttacttcgctaaagctttggccgaaggttacttgaagtctactattacccaaatcgaacgtagattcgacatcccatcttcattggttggtattatcgatggttccttcgaaatcggtaacttgttggttattgccttcgtttcttacttcggtgctaaattgcataggccaaagattattggtgctggttgtttgattatgggtgtcggtactttgttgattgctactccacatttcttcatggaacagtacaagtacgaaagatactctccagcttctaactccaccttgtctatttctccatgtttgttggacagcaacaactctttgccaattccagctgttgaaaagtcccaatccaagattaacaacgaatgccaagttgatgcctcttcttctatgtgggtttatgtctttttgggcaacttgttgagaggttttggtgaaactccaattcaaccattgggtattgcttacttggatgatttcgcttctcaagataatgccgctttctacattggttgtgttcaaaccgttgctattatcggtccaattttcggtttcttgttgggttctttgtgtgctaagttgtacgttgatactggtttcgttaacttggatcacattactatcactccaaaggatccacaatgggttggtgcttggtggttgggttatttgattgctggttctattaccttgttggctgctgttccattttggtgtttgcctagaactttgccaagaccaagatctagagaagattcctcttcctcctcggaaaaatccaagttcattatggatgacttgaccgactatcaaactccaccaggtgaaaaagctaagattatggaaatggccagagacttcttgccatctttgaaatctttgtttggtaaccccgtctacttcttgtacttgtgtgcttctactgtgcagttcaattctttgttcggtatggttacttacaagcccaagtacatcgaacaacaatatggtcaatctgcttccaaggccaatttcgttattggtttgattaacattccagccgttgccttgggtattttctctggtggtatcattatgaagaagttcagagtctctattagaggtgctgcaaagttgtatttgggttcatctgttttgggctatctgctgtttttgtccttgtttgctttgggttgtgaaaactctgatgttgctggtttgaccatttcttaccaaggtacaaaaccagtctcttaccacgaaagagctttgttttctgattgcaactctagatgcaagtgctctgaaacaaaatgggaacctatttgtggtgagaacggtattacttatgcttctgcttgtttggctggttgtcaaacttctacaagatctggtaagaccaccattttcaacaactgtacatgtgttggtttggctgcttctaagtctggtaattcttctggtatggtcggtagatgtcaaaaggataatggttgtgctaagatgttcctgtacttcttgattattgccgtcattacctcctacactttgtctgttggtggtattccaggttacatcttgttgttgagatgcatcaaaccacagttgaagtctttcgctttgggtatctatactttggccgttagagttttggcaggtattccatctccaatctatttcggtgttttgatcgatacctcttgtttgaagtggggttttaagagatgtggtactaagggttcttgtaggttgtacgattctaatgccttcagacatatctacctgggtttgactatgatgttgggtatcatgtccatctttttgtctaccgctgttttgttcaccctgaagaagaactacgtttctaagcacagatccttcagaactaagagggaaagaactatggtttccaccaggatcagaaaagaaaactgtactaccaacgatcacttgttgcaacctaattattggccaggtaaagaaacccagttgtaa

SEQ ID NO: 922 - protein, 712 aa, Capra hircus
MDTSSKENIRLFSKNSMQPVGRLSFKTEYPSSEEKQPCCCQLKVFLGALSFVYFAKALAEGYLKSTITQIERRFDIPSSLVGIIDGSFEIGNLLVIAFVSYFGAKLHRPKIIGAGCLIMGVGTLLIATPHFFMEQYKYERYSPASNSTLSISPCLLDSNNSLPIPAVEKSQSKINNECQVDASSSMWVYVFLGNLLRGFGETPIQPLGIAYLDDFASQDNAAFYIGCVQTVAIIGPIFGFLLGSLCAKLYVDTGFVNLDHITITPKDPQWVGAWWLGYLIAGSITLLAAVPFWCLPRTLPRPRSREDSSSSSEKSKFIMDDLTDYQTPPGEKAKIMEMARDFLPSLKSLFGNPVYFLYLCASTVQFNSLFGMVTYKPKYIEQQYGQSASKANFVIGLINIPAVALGIFSGGIIMKKFRVSIRGAAKLYLGSSVLGYLLFLSLFALGCENSDVAGLTISYQGTKPVSYHERALFSDCNSRCKCSETKWEPICGENGITYASACLAGCQTSTRSGKTTIFNNCTCVGLAASKSGNSSGMVGRCQKDNGCAKMFLYFLIIAVITSYTLSVGGIPGYILLLRCIKPQLKSFALGIYTLAVRVLAGIPSPIYFGVLIDTSCLKWGFKRCGTKGSCRLYDSNAFRHIYLGLTMMLGIMSIFLSTAVLFTLKKNYVSKHRSFRTKRERTMVSTRIRKENCTTNDHLLQPNYWPGKETQL

SEQ ID NO: 923 - DNA, 1800 bp, Cyanobium sp. NIES-981
  source 1..1800: mol_type = other DNA
atggctgccttggatagagaaagattgagaagattattgccctacttgggtagagatagaagaaggttgttggttaccttggttttgttgattccagttgctggtgctgctgctattcaaccattattggttggtcaagttatcgccgttttgagaggtgaacctactttgacatttttgactggtatgccagttccacaagccttgagattattagttttggttttattgggtgccgtcttgttgagattggctttacaaggtttacagtcctactctgttcaagctgttggtcaaagattgaccgctagaattagagatgatttgttcgctcatgctatggccttgtctttgagatttcatgatagaactccagtcggtaagttgttgactagattgacttctgatgttgatgctttggctgaagtttttggttctggtgctgttggtgttttagctgatttggttactttgttggtcattgccttgaccatgttgtctattgaatggcgtttgggtttgctgttgttgtgttctcaagttccagttgttttgggtatgttgtggttgcaaagaagatacagaagggctaactacagagtcagagaagaattgtctcaattgaacgctgacttgcaagaaaacttgcaaggtttggaagttgtccagatgttcagaagagaaagagttaattctgctagattcgctagaactaccgatgcttatagacaagctgttaccggtactatcttttacgattctgctatttccgccttcattgaatgggttgctttggttgctgttgcattggttttggctttaggtggttctatggttacagctggtgctttaggtttgggtactttgactactttcatcttgtactcccaaaggttgttcgatccattaagacaattggctgaaagattcacccaaatccaaggtggtttgactgctgttgaaagaatcggtgaattattggaacagccaatcgaaatccaagaattgccagcttctcaaagatctgctgcagctagaagatctggtggacaaagatcatctgctggtgaagttgttttcgaacatgtttctttcgcctacagacaagatgatccaattttgaccgatctgtcctttagaattgctccaggtgaacatgttgcattagttggtccaacaggttctggtaagactactgttattagattgctgtgcaggttgtacgaacctcaacaaggtagaattttgttggatggtatcgacattagggaattgcctattccaactttgagacaaagattgggtgttgtattgcaagacacctttttgttctctggtaacgttgccgataatttgagattagatgctccaattgccaacgatgaattggcccaattgtgtagagaattgggtttagatcctctgctaagaagattgccagaaggtttggctactgaattgagagaacgtggtggtaatttgtcatctggtgaaagacaattattggccgttgctagagttgctattagagatccatctgttttggttatggatgaagctactgcatttttggatccatctactgaagctaccttgcaacaagatttggatagattgctacaacaaagaaccgctatcgttattgctcatagattggcaactgttgaagctgctgatagaatattggtattgcagagaggtagattgatcgaacagggtactcatagacaattgagagctgctggtggtctatatgctagattagctgaattacaggataagggtttagctgccttgtga

SEQ ID NO: 924 - protein, 599 aa, Cyanobium sp. NIES-981
MAALDRERLRRLLPYLGRDRRRLLVTLVLLIPVAGAAAIQPLLVGQVIAVLRGEPTLTFLTGMPVPQALRLLVLVLLGAVLLRLALQGLQSYSVQAVGQRLTARIRDDLFAHAMALSLRFHDRTPVGKLLTRLTSDVDALAEVFGSGAVGVLADLVTLLVIALTMLSIEWRLGLLLLCSQVPVVLGMLWLQRRYRRANYRVREELSQLNADLQENLQGLEVVQMFRRERVNSARFARTTDAYRQAVTGTIFYDSAISAFIEWVALVAVALVLALGGSMVTAGALGLGTLTTFILYSQRLFDPLRQLAERFTQIQGGLTAVERIGELLEQPIEIQELPASQRSAAARRSGGQRSSAGEVVFEHVSFAYRQDDPILTDLSFRIAPGEHVALVGPTGSGKTTVIRLLCRLYEPQQGRILLDGIDIRELPIPTLRQRLGVVLQDTFLFSGNVADNLRLDAPIANDELAQLCRELGLDPLLRRLPEGLATELRERGGNLSSGERQLLAVARVAIRDPSVLVMDEATAFLDPSTEATLQQDLDRLLQQRTAIVIAHRLATVEAADRILVLQRGRLIEQGTHRQLRAAGGLYARLAELQDKGLAAL

SEQ ID NO: 925 - DNA, 4113 bp, Cyberlindnera jadinii NRRL Y-1542
  source 1..4113: mol_type = other DNA
atgaactccgttgaatccgccgataagaactatgttatagtttccgatggttccgagaagttgtctccagttccaccattgcaaagaagattattgactccattcctgtccaaagaagttccacctattccagttgatgaagaaagagttaagtacccctacttgatgactaacccattctctactgttttcttcacttggttgaaccctttgttgaaggttggttacaagagaactttgtccccaaacgatttgttcaagattgctgataaggatgccttggattacacttactctaccttcgaaagacacttggacgaaatcatccaaaaggatagagatgccttgaagttgagagatccatctattaccgaagaagaattggaagctagagagtatccaaagaacgctattttgaaggccttgctgaaaactttcaagtgggaatattctttcgccgtgttcttcaagttgttgtctgatactgctcaagttttgactcccttgttgtctagagctttgattacttacgttcaagacaagactgttgatccaggtttgccagttaacaatggtgttggttatgctattggtgtcactttcatgttggctgttactactttgtgtaccaaccacttcttgtacttgtctttgaccgttggtttacatgccaagtctattttgactaccgctgtcttgaagaagtctttcaaagcttcatctgttaccagacatactttcaccaatggtagagttacctccttgatttctgctgatttggctagagttgatttggcctttggttttcaaccatacgttattactgcacccgttccaattatcgttaccattgctttgctgatcatcaacatcggtgtttcttcattggctggtattgctatgtttttggttgccttgtttgttattggtgcttgttctggtgctttgatggctttgagaaagaaggttaacaagttcaccgactccagaatctcttacatgagagaaatcttgcagaacatgaagatcatcaagctgtactcttgggaagatgcttacgaaaagactgttactgacgaaagaaacaacgaaatcggtgtcatgttgaagatggtgtctgttagaaactttttgatggccttcgctatctctttgccatctgttgtttctatggttgctttcttggtcttgtacggtgtttcccaagatcaaaatccagccaatattttcacctccttgtacctgtttagtttgttggctggtcaaatcatgatggttccaatggctttgtctactgctactgatgctaaaatcggtttggaaagattgaggttgtacttgcaatctggtgaagttcaatctaacgatgatgacaaaggtgaagatggcactaattctttgccagaagatgttgctattcaagttaccaacgcttccttcatttgggaaaagttcgaagatgaagataacgaagctgaagaaactccagaaaccacctcttctattgaaagattggacgaattgtctaagcacgactttgaaggtttctccaacatcaacttctccatcaagaagtccgaagttgttttgattacaggtccaatcggttccggtaaatcatctttgttgttggctttagcaggtcaaatgactaagacttccggttctttgaaaactgctggttctttgttatctgctggtcaaccatggattcaaaacgctactgtcaaagaaaacatcttgttcggtgaaccattcaaccaggatagataccaacaagttgttagagtttgcgctttggaagatgacttgcagtcttttactgctggtgatgctactgaagtaggtgaaagaggtattactttgtccggtggtcaaaaggctagaatcaatttggcaagagctgtttacgctaacaaggacattatcttgttggatgatgttttgtccgctgtcgattctagagttggtaagattatcgttgacgagtgcttcaagaagttcttgcgtaaaaagactatcgttttggctacccaccaattgtctttggttcattttgctgatagagccatcttcttgaacggtgatggttctattaacatcggtactgtcgaagaattgtccaaaacttcttctggcttcctgaagctaatggaatactcttctagaccagattccgatacctctaatgatggtcaaaacgaaaagttggagggtatcttgtcaggtaagtctgttcatcataacccacaagaatccaccttgattgaagatgaggaaagagcagttaacgccattgaatggtctgtttacaaagcctacttgcatgaaggtcaaggtaaatttggtgttttcgccattccattgattgccatgtttatgacctttgacgttttcttgaccatcttcgttaatgtctggttgacctactggattaacgattcatttccaggtagatctgacggtttctacattggtttttacgttatgttcgtcgtcttgtctatcgttgctatctcctctgaattcattatgatgggctactttttcagcactgcatctagaaggttatacctgaaggttttgaaaagagtcttgcataccccaatgcactacttggatgttactccaatgggttgtgttttgaacagattcactaaggataccgactcattggataacgaaattggccaagaattgaccatgttggtttatccaggtgcaattttgaccggtactgttattttgtgcgttgtttacttgccatggttcgctattgctttaccaccattattggttgttaccactgctactaccaatttctacgttgcttcttccagagaagtcaagagaattgaagccttgcaaagatcccatgtgttcaacaacttacacgaaattttgaacggcttgcaaaccttgaaagcttacaatgctttggaaaggttcatggacaaaaacaagcacttgatcgacagaatgaacgaagcctacattttggttatcgccaatcagagatggatcagcattcatttggaactggtttcttgcttgttggttttggttgttgctctgttgtctgtgttcagagtgttcaatattaacgctgcttctgtcggcttgattatcaactacgttatgcaagttgctaccttcatgtccttggttatgagatcttacacctctgtcgaaaacgagatgaattctgttgaaaggttgtgcttctacgcccatgatttggaacaagaaccaccatatagaatcaacgaaactagaccaagaccatcttggccagaacatggtgcaatagaatttcagaacgtgtccatgagatacagatatggttctccattggtcttgaggaacttgtccatttctgtaaaaggtggtgaaaagatcggtatttgtggtagaactggtgctggtaaatcctccattatgaacgtcttgttcagattgtcagaaccagctgaaggtactgttttgatcgatggtgttgatacttctaagttgggcttgtacgatttgaggtccaagttgtctattattccacaagatccagtgttgttcaggggtactattagaaagaatttggacccattcgaacagtccgaagattctgctttgtgggaagctttaagaaaggctggtttgattgataccgacgttttgagaaaagccatttctcaacatccagatgatccaaacagacacaagttccatttggatcaattggttgaggatgacggttctaatttctctaatggtgaaagacagttgatcgctttagctagagcattggttagagactccaagatcttagttttagatgaagccacctcctccgttgattacgaaacagatgcaaaaatccagaacactatcgccgaagaattctctgaatgtaccattttgtgcattgcccacagattgaacaccattttgaactacgataggatcctggtcttagaacaaggtaaggttgaacaatttgataccccatgggctttgtttaaccaggatggtattttcagacagatgtgcgaaagatctggtatcaagtcatcagaaagattgtctcagaactggtccttgagattggatggtgcttaa

SEQ ID NO: 926 - protein, 1370 aa, Cyberlindnera jadinii NRRL Y-1542
MNSVESADKNYVIVSDGSEKLSPVPPLQRRLLTPFLSKEVPPIPVDEERVKYPYLMTNPFSTVFFTWLNPLLKVGYKRTLSPNDLFKIADKDALDYTYSTFERHLDEIIQKDRDALKLRDPSITEEELEAREYPKNAILKALLKTFKWEYSFAVFFKLLSDTAQVLTPLLSRALITYVQDKTVDPGLPVNNGVGYAIGVTFMLAVTTLCTNHFLYLSLTVGLHAKSILTTAVLKKSFKASSVTRHTFTNGRVTSLISADLARVDLAFGFQPYVITAPVPIIVTIALLIINIGVSSLAGIAMFLVALFVIGACSGALMALRKKVNKFTDSRISYMREILQNMKIIKLYSWEDAYEKTVTDERNNEIGVMLKMVSVRNFLMAFAISLPSVVSMVAFLVLYGVSQDQNPANIFTSLYLFSLLAGQIMMVPMALSTATDAKIGLERLRLYLQSGEVQSNDDDKGEDGTNSLPEDVAIQVTNASFIWEKFEDEDNEAEETPETTSSIERLDELSKHDFEGFSNINFSIKKSEVVLITGPIGSGKSSLLLALAGQMTKTSGSLKTAGSLLSAGQPWIQNATVKENILFGEPFNQDRYQQVVRVCALEDDLQSFTAGDATEVGERGITLSGGQKARINLARAVYANKDIILLDDVLSAVDSRVGKIIVDECFKKFLRKKTIVLATHQLSLVHFADRAIFLNGDGSINIGTVEELSKTSSGFLKLMEYSSRPDSDTSNDGQNEKLEGILSGKSVHHNPQESTLIEDEERAVNAIEWSVYKAYLHEGQGKFGVFAIPLIAMFMTFDVFLTIFVNVWLTYWINDSFPGRSDGFYIGFYVMFVVLSIVAISSEFIMMGYFFSTASRRLYLKVLKRVLHTPMHYLDVTPMGCVLNRFTKDTDSLDNEIGQELTMLVYPGAILTGTVILCVVYLPWFAIALPPLLVVTTATTNFYVASSREVKRIEALQRSHVFNNLHEILNGLQTLKAYNALERFMDKNKHLIDRMNEAYILVIANQRWISIHLELVSCLLVLVVALLSVFRVFNINAASVGLIINYVMQVATFMSLVMRSYTSVENEMNSVERLCFYAHDLEQEPPYRINETRPRPSWPEHGAIEFQNVSMRYRYGSPLVLRNLSISVKGGEKIGICGRTGAGKSSIMNVLFRLSEPAEGTVLIDGVDTSKLGLYDLRSKLSIIPQDPVLFRGTIRKNLDPFEQSEDSALWEALRKAGLIDTDVLRKAISQHPDDPNRHKFHLDQLVEDDGSNFSNGERQLIALARALVRDSKILVLDEATSSVDYETDAKIQNTIAEEFSECTILCIAHRLNTILNYDRILVLEQGKVEQFDTPWALFNQDGIFRQMCERSGIKSSERLSQNWSLRLDGA

SEQ ID NO: 927 - DNA, 4167 bp, Wickerhamomyces mucosus
  source 1..4167: mol_type = other DNA
atgacctccaaagaaacctctatgggcttgcaagttgatgatgattctccattgccagaattggagagaagattgatgactccattcttgtctaaaacggttccaccaattccaaaagaaaacgaaagattgccataccaattgaaccatgccaacttcatctccaagatatttttctggtggctgaacccaattatgaacgttggttacaagagaactttgaccccaaatgacttgtactacgttgaaaacgatttgaccgctaagcaaaactacgatgacttcatgatcaacctgaacaaggttttgtctaaggctaaattgaaggccaagttgaagaacccagaattgaccgatgatgaattggacgaattgccttatcctaagttctccttggttattgctttgctgatgaccttcaagtacaagtactctaaggctgtgttcttcaagttgttgtccgatatctctcaagtcttgaatcctttgttgaccaaggctttgattaacttcgttgagaaaaagacctacttgccagatactccagttggtaaaggtattggttatgccattggtgtttctgctatgttggttgctaatggcattttcctgaaccatttcttgcacaactctatgaatgttggtgcccaatccaagtctattttgactactgctttgttgaagaagtccttcaaagctactccaaagactaagcacacttacacctctggtaaggttacctctattttgtccacagacttgtccagaatcgatttggctattggttttcaaccattcgccattacttttccagttccagttatagtttctgtcgccttgttgatcgttaacataggtgtttcagctttggttggtattgccattttcttggttgctgttggtggtattggtacttctgctaaatggttgttgaacatgagaagaggtgctaatcagtacactgataagcgtgttggtttgatgagagaaatcctgaactccatgaagatcatcaagttctactcttgggaagatgcctacgaaaagaacgttgttgatcagaggaacaaagagatctccatcatcttgaagatgcagacgattaggaatttcttgttcgctttcgctatttccttgccaaccgttatttctatggtttcctttttggtcttgtacgccttgtctaacaaacaaaatgccggtgatatcttctcctccttgtctttgtttggtactttgtcccaacaggttttgatgttgccaatggctttagctactggtgctgatgcttttattggtatcactagagtcagagaatacttgcagactaaggatttggaagtcgaagatggtattccagacaactacaacaacgaaaacttggacgaaaatctggccttgaaagttactgatgcttcttacaagtgggaaaagttcgacgatatcgaagatgaagaaaagcaacaacaagaagctgccgaaaacgaagatgaggatgatgataacgaaacgaagttggagtctaacaagaacgagtcctctatctcttctgagttttcttcaaaggacgaaaagacttctaccaaggctgtttttgaaggtttcaacaacatcaacctggaaatcaagaagaatgagttcgtcattattaccggtccaatcggtactggtaaatcctctttgttaactgccttgtccggttttatgaagcaaacctctggtgaaattgccatcaatggttctttgttgttgtgtggtcaaccatgggttcaaaacgctactttcaaagagaacatcatcttcggttctccatacgaagaagaaagatacaacaaggttattgaagtctgcgccttgaaggatgatttgaaaattttgccaggtggtcacaactccgaaattggtgaaagaggtattaacttgtctggtggtcaaaaggctagaatcaacttagctagagctgtttactctggtaaagacaccattttgttcgatgatgttttgtccgctgttgatgctagagtcggtaaacatattatcgatgaatgcttcaccaagttcttggctgataagactagaattttggctacccaccaattgtccttgattgataaggctgatagagtcatcttcttgaacggtgatggtactattaacattggtactgtcccagagttgctgtcctctaacaaaaatttcgaaaagttgatggacttcgccacctcttataatgatccagacttagaggatgaggtcttgatcaaagaagataaccagttgcaaaggcagctgtctaagaagttcactgaatccaaagaattcgaggacccagaaaatgagaacggtgttttgatagctgatgaagagagagctagaaacgctatttcttggtctgtttacaagcagttcttgaaagaaggtcaaggtatgtttggtgttttcgctgttccattggcattcttgttgatggttggtgatgttttctgctccattttcgttaacgtttggttgtccttctggatctctaaaaagtttccaggtagatccgatggtttctacattggtatctacgtgatgttcaccttcacctctgttttgatgatttcctgcgaattcatggtcatgggttacattactactaccgcctctaagaagctaaacttgagagctatggttagagtcttgcatactccaatgtctttcttggatacaaccccaattggtagggtcttgaatagattctctaaggataccgatgtcttggacaatgagataggtggtcaattgagaatgtttactcatccagccggttttgttatcggtgtcattattttgaacatcgtctacttgccttggtttgctttgtctattccaccattggccatttgcttcgtgtgtattactaattactaccagtcctccagcagagagattaagagattggaagctgttcaaaggtccttcgtctacaacaattttaacgaagtgttgtccggtatgaacaccattaaggcttacaaatccaacaacaggttcatcgttaagaacgactacttgatcgacagaatgaacgaagcttactacatcaccattgccaatcaaagatggatctccttgcatttggatttggttgcttgtgctttggctttggtcattacaattttgtctgccactagacagttcgatattaacgctgcttctgtcggtttgattactacctacactttacaattggccggcttgatgtctttgattttgagagcttacacccagatcgagaacgaaatgaattctgttgaaagattgtgccactacgctaatgatttggctcaagaaaaccagtacagaaacgaagaaacaaagccacaaggtcaatggccaactcaaggtgctattgagtttaatcaagtctccttgagatacagagatggtttgcctttggttctgaagaacttgtccatcaatattggtggtggtgaaaaagttggtatttgtggtagaacaggtgccggtaaatcttctattatggttgccttgtaccgtctgaacgaattgtctcaaggtactatcaaaatcgatggtgtcgatgtttctaagttgggtttgtttgacttgaggtccaagttgtccattattccacaagatccagctttgttccaaggctctattagaaagaatttggacccattcgatgaacacgaggattcaattttgtgggatgctttgagaagatccggtttgatagaaccagaagaattgtcctctgccattaacaactctgataagtctaccttccataagttccacttggatcaattggttgaggatgaaggtgctaacttttcattgggtgaaagacaattgattgctttggcaagagctttagttagagactgcaagattttgatcttggatgaagctacctcctccgttgattacgaaactgattctaagatccaaaacaccatcaagaacgaattcaaggattgcaccatcttgtgcattgcccatagattgaaaactatcttgaactacgacaagatcctggtcttggaaaaaggtgaaatcgaacaatttgacgagcccattaagttgttccacgatgaattaggtatcttcaagcagatgtgcgaaaagtccgatattaccattgctgacttcgagtga

SEQ ID NO: 928 - protein, 1388 aa, Wickerhamomyces mucosus
MTSKETSMGLQVDDDSPLPELERRLMTPFLSKTVPPIPKENERLPYQLNHANFISKIFFWWLNPIMNVGYKRTLTPNDLYYVENDLTAKQNYDDFMINLNKVLSKAKLKAKLKNPELTDDELDELPYPKFSLVIALLMTFKYKYSKAVFFKLLSDISQVLNPLLTKALINFVEKKTYLPDTPVGKGIGYAIGVSAMLVANGIFLNHFLHNSMNVGAQSKSILTTALLKKSFKATPKTKHTYTSGKVTSILSTDLSRIDLAIGFQPFAITFPVPVIVSVALLIVNIGVSALVGIAIFLVAVGGIGTSAKWLLNMRRGANQYTDKRVGLMREILNSMKIIKFYSWEDAYEKNVVDQRNKEISIILKMQTIRNFLFAFAISLPTVISMVSFLVLYALSNKQNAGDIFSSLSLFGTLSQQVLMLPMALATGADAFIGITRVREYLQTKDLEVEDGIPDNYNNENLDENLALKVTDASYKWEKFDDIEDEEKQQQEAAENEDEDDDNETKLESNKNESSISSEFSSKDEKTSTKAVFEGFNNINLEIKKNEFVIITGPIGTGKSSLLTALSGFMKQTSGEIAINGSLLLCGQPWVQNATFKENIIFGSPYEEERYNKVIEVCALKDDLKILPGGHNSEIGERGINLSGGQKARINLARAVYSGKDTILFDDVLSAVDARVGKHIIDECFTKFLADKTRILATHQLSLIDKADRVIFLNGDGTINIGTVPELLSSNKNFEKLMDFATSYNDPDLEDEVLIKEDNQLQRQLSKKFTESKEFEDPENENGVLIADEERARNAISWSVYKQFLKEGQGMFGVFAVPLAFLLMVGDVFCSIFVNVWLSFWISKKFPGRSDGFYIGIYVMFTFTSVLMISCEFMVMGYITTTASKKLNLRAMVRVLHTPMSFLDTTPIGRVLNRFSKDTDVLDNEIGGQLRMFTHPAGFVIGVIILNIVYLPWFALSIPPLAICFVCITNYYQSSSREIKRLEAVQRSFVYNNFNEVLSGMNTIKAYKSNNRFIVKNDYLIDRMNEAYYITIANQRWISLHLDLVACALALVITILSATRQFDINAASVGLITTYTLQLAGLMSLILRAYTQIENEMNSVERLCHYANDLAQENQYRNEETKPQGQWPTQGAIEFNQVSLRYRDGLPLVLKNLSINIGGGEKVGICGRTGAGKSSIMVALYRLNELSQGTIKIDGVDVSKLGLFDLRSKLSIIPQDPALFQGSIRKNLDPFDEHEDSILWDALRRSGLIEPEELSSAINNSDKSTFHKFHLDQLVEDEGANFSLGERQLIALARALVRDCKILILDEATSSVDYETDSKIQNTIKNEFKDCTILCIAHRLKTILNYDKILVLEKGEIEQFDEPIKLFHDELGIFKQMCEKSDITIADFE

SEQ ID NO: 929 - DNA, 4164 bp, Cyberlindnera americana
  source 1..4164: mol_type = other DNA
atggccgaagatttgggtttgtcctctccaaaaactgatccagaagattcctctaagttggtcttggagagaagaattatgaccccattcttgtctaaaaaggttccaccagttccaactgaagctgaaagaaagtatttccccaagaacaagaaccccttgtccttgattttctactggtggttgaatccaatcatgaaggttggttacaagagaactttgactccaaacgacttgtacaaattgaccccagaaatgaagatcgatcacacctatgataagttcgagaagatcctgatgaagattgtcgaaaaggatagagctaaagccttggctgaagatccatctttgactgaagaagatttgatcagaaggccctatccaaagtatgctttgccaaaagctttgttcttgaccttcaagtggaagtacattttggccttgttcttcaaggttttggctgatgtttgtggtgtctgtaatcctttgttgtccaagaagttgattgccttcgttgagagaaaaacctctgatccatcattggctgttaacgatggtattggttatgctttgggttgtaccttcttggttttgttctctggcatcatgattaaccagtccttgttgcattctttgactactggtgctcattgcaagggtattttaactactgctttgctgcgtaagtctttcaaagctgatgctgaaactagacacaagtacacctctggtagaattacctctattatgtctaccgatttggccagaattgatttggctattggttttcaaccattcggcttgacttttccaattccagttattattgccatagccttgttgatcgttaatatcggtgtttcttctttggctggtattgccgttttcatcatttccatagttgctattggtggttccgctagattcctaatgaagatgagaagaggtgctaacaagtataccgacaagagaatctctttgatgagggaaatcttgcagtccatgaagatgatcaagtactactcttgggaagatgcctacgaaaagtccgttattcagcaaagaacaaaagaggtcggtatcatcttgaagatgcagtctattagaaacggtttgttggctttctctattgccttgccagctttcacttctatgattgcatttttggtcttgtacggcgtgtcctctaacaaaaatccagctaacattttccccagcgtttctttgtttggtactttggctcaacaaaccatgatgttgccaatggctttggctacaggtgctgatgctatgattggtttgggtagagttagagaattcttggaatctggtgttgatttgaaggaccctgaagaatttgatggtcatgctccagaaacagacgaagaggtaaaagaattgccatccgatgttgctatcgaagctaaagatgctactttcatctgggaaaagttcgctgaagttgactctgaagaaacttctgatgcttccaagtctgacaaagagacttcttctactttgtccgaaggtgagttgaaaaagaccttgtcatctgaagaggaagaaggtaacgaacagtacactaactctgttttcgaaggtttccacaacatcaacttggagattaagaagaacgagttcatcattgtcactggtgcaattggttctggtaagtcatctttgttgactgctttagctggtttcatgaagagaactactggttctttgtctgttggtggtagtgttttgttgtgtggtactccatgggttcaaaatgctactgttagagaaaacattaccttcggtttggaatacgacgaagaaagatacgaaagggttttagatgcttgcgctttgagagatgacttgaagttgtttacaggtggtgatttgaccgaaattggtgaaagaggtattacattgtctggtggtcaaaaggctagaatcaatttggctagagctgtttatgccgacaaagaaatcgttttgttcgatgatgttttgtccgctgttgatgctagagttggtaaacatatagttgatgattgcctgtgcgatttcatgggtcataagactagaattttggctacccaccaattgtctttgattgataaggctgatagggtcatcttcttgaatggtgatggtactattcacatcggtacagttaatgagttgttgcagtctaatgaaggcttcgtcaaactgatggaattctccaagaaatccgaagaggacgaaaagaatgaagaagaagaagaggaagctgacgtcttgaaattgcaaaagtctcaatctattgccgcctctcaaaacaatgatgctgttgctggtattttggttggtgaggaagaaaaagctaagaacggtatttccttctccgtttacaccaactacttgaaagaaggtggcggtatttttggtaaatttgctggtccattgaccttgttgtttttgactttcgatgtgttcacctccattttcatcaacgtttggttgactttctggataaccgataagtggtcttatagatcccaaggtttctacatcggtatctacgttatgctggttttgatgaacatcgtcgttattgcttgctgcttgattttgatgggttacatttctactacctccgccaagtctttgaatttgaaagctatgaagaggatcctgcactctccaatgtcttttatggatgttactccaatgggcagaatcttgaacagattcactaaggatactgacgtgttggataacgaaatcggtgaacaagttagaatgttcttgcatccagcaggtttcgttgttggtgttgttattttgtgcatcatctacttgccatggttcgctttggttattccacctgttgttatcgtttcaactttgaccgctagtttctaccaagcttcttctagagaaatcaagagattggaagccgttcaaaggtctttcgtctacaacaatttcaacgagatcttgaacggtatgactaccttgaaagcttacagatctacctctagattcttggccaaaaacgaagttttcgtcgactctatgaatgaggcttacttcatcgttatcgctaaccagagatggatttccattcacatggatttggttgctgtttgcttgttggcagttgtttctttattgactgttaccaggcagttcaacatttctgctgcttctaccggtttggttgttactaatgttttacagatcggtggcctgatgtcattgattatgagagcttataccaccgtcgaaaacgaaatgaattctgtcgaaaggttgtaccaatacgccaacactttggttcaagaaaagccatacagagtgaacgaaactgttccagctccatcatggccagaaactggttctattaagttcgaaaatgtctccctgagatacagagaaggtttgcctatggttctgaagaacttgtctatgtctgttaagggctctgaaaagattggtatttgtggtagaactggtgccggtaaatcttctattatgactgccttgtacaggttgtctgaattagctgaaggtgccatcttgattgatgatgttgacatctctaaactgggcatgttcgaattgagatccaagttgtctattatcccacaagatccagttttgttccaaggctccattagaaagaatttggatccattcggtgaatccgatgatgaacacttatgggatgctttgagaagatctggtttgaccgatgcttctatcttgactactattaaggcccaaactaaggatgatccaaacttccataagttccacttggatcaaatcgtcgaagatgaaggttctaacttctcattgggtgaaagacaactattggctttagcaagagccttggtcagaaattccagaattttgattttggacgaagccacttcctccgttgattacgaaactgatgctaagatccaaaacaccattaccaacgagttttccaactgtaccattttgtgtatcgcccacagactgaaaaccatcttgaactatgataggatcctggtgttggaacaaggtgaaattgaagaattcgataccccaatcaggttgtacgaaaatgatggtatcttcaagcagatgtgcgaaagatctgatatcaccagagaagattttcacatccagaagtaa

SEQ ID NO: 930 - protein, 1387 aa, Cyberlindnera americana
MAEDLGLSSPKTDPEDSSKLVLERRIMTPFLSKKVPPVPTEAERKYFPKNKNPLSLIFYWWLNPIMKVGYKRTLTPNDLYKLTPEMKIDHTYDKFEKILMKIVEKDRAKALAEDPSLTEEDLIRRPYPKYALPKALFLTFKWKYILALFFKVLADVCGVCNPLLSKKLIAFVERKTSDPSLAVNDGIGYALGCTFLVLFSGIMINQSLLHSLTTGAHCKGILTTALLRKSFKADAETRHKYTSGRITSIMSTDLARIDLAIGFQPFGLTFPIPVIIAIALLIVNIGVSSLAGIAVFIISIVAIGGSARFLMKMRRGANKYTDKRISLMREILQSMKMIKYYSWEDAYEKSVIQQRTKEVGIILKMQSIRNGLLAFSIALPAFTSMIAFLVLYGVSSNKNPANIFPSVSLFGTLAQQTMMLPMALATGADAMIGLGRVREFLESGVDLKDPEEFDGHAPETDEEVKELPSDVAIEAKDATFIWEKFAEVDSEETSDASKSDKETSSTLSEGELKKTLSSEEEEGNEQYTNSVFEGFHNINLEIKKNEFIIVTGAIGSGKSSLLTALAGFMKRTTGSLSVGGSVLLCGTPWVQNATVRENITFGLEYDEERYERVLDACALRDDLKLFTGGDLTEIGERGITLSGGQKARINLARAVYADKEIVLFDDVLSAVDARVGKHIVDDCLCDFMGHKTRILATHQLSLIDKADRVIFLNGDGTIHIGTVNELLQSNEGFVKLMEFSKKSEEDEKNEEEEEEADVLKLQKSQSIAASQNNDAVAGILVGEEEKAKNGISFSVYTNYLKEGGGIFGKFAGPLTLLFLTFDVFTSIFINVWLTFWITDKWSYRSQGFYIGIYVMLVLMNIVVIACCLILMGYISTTSAKSLNLKAMKRILHSPMSFMDVTPMGRILNRFTKDTDVLDNEIGEQVRMFLHPAGFVVGVVILCIIYLPWFALVIPPVVIVSTLTASFYQASSREIKRLEAVQRSFVYNNFNEILNGMTTLKAYRSTSRFLAKNEVFVDSMNEAYFIVIANQRWISIHMDLVAVCLLAVVSLLTVTRQFNISAASTGLVVTNVLQIGGLMSLIMRAYTTVENEMNSVERLYQYANTLVQEKPYRVNETVPAPSWPETGSIKFENVSLRYREGLPMVLKNLSMSVKGSEKIGICGRTGAGKSSIMTALYRLSELAEGAILIDDVDISKLGMFELRSKLSIIPQDPVLFQGSIRKNLDPFGESDDEHLWDALRRSGLTDASILTTIKAQTKDDPNFHKFHLDQIVEDEGSNFSLGERQLLALARALVRNSRILILDEATSSVDYETDAKIQNTITNEFSNCTILCIAHRLKTILNYDRILVLEQGEIEEFDTPIRLYENDGIFKQMCERSDITREDFHIQK

SEQ ID NO: 931 - DNA, 4059 bp, Ogataea philodendri
  source 1..4059: mol_type = other DNA
atgtccgttgaagaaaccgctggtactaatttggctctacaaaagagatctttgaccttcttgttcggtaaaaaggttccaccattgccattggaagaagagagaaaagtttttccacattaccacaccaacatcatctacagagctttcttttggtacttgaccccattgatgagagttggttacaaaagaacattgcaaccagaggacatgtacttgttggatgaagaacaaaccatcgactacatgtacaagaagttcattgcctccgttgattccgatttggaaaagcaaaaggctaagcacattctgaaaaagtgcaaagaaagaggtgaaaccccagaatcttcttcagttgatccagaaactgacttggaagatttcgaattgcactacgtttacttggtcaagggtttgattagagttttcggttggcaatatggttgggctactttcattaaggctttcgctgatttgtcatctgctttgttgcctttggttttgaagcgtttgatcaacttcgttgaaagaaaggcttatggtttggaaccacatgttggtaaaggtattggttacgcttttggtgtttccttgatggtttacttttctggttttgccttcaaccacttcttctacaactctactactgttggtgctaaggttaaggctgttttgacaaaagctttgttggagaagtctttcaccttggatgctagaggtaaacataagttcccaatcggtaagatcaactccattatgggtactgatttgaccagagttgatttggctttgggtttctttccattcttgttgggttttcccattccattgatcgttatcatcgttatgttgttggttaacatcggtgtttctgctttggctggtattggtgtttttgtgatgtctattttcttgaccggtttcatcgttagagagttgttcagattgagagttatcgctaacgttttcaccgacgaaagagtcaatttggtcaaagagctgttgaagaacttcaagatgatcaagatgtacggttgggagaactcctacttcaaagaattcatggacatcaggcagaaagaaatgactaccgttttgagaatgcaagttgccagaaacgttttgattgctgttgctatttggctgccaatcgtttcttctatggttgcatttttggtcttgcacaagatcgattctaacagaacagttggtgacatcttctcctcattgtctttgttccaagaattgaccactcagtttttgatggttccagctgctttagctatgtctaccgatatggttattgctttcaagaggatctctcagttgttgtcttgtccagatggtcaagaattggctacctttttcgatactttggatgatcctaaattggccctgcaattgaagaatgcttcttttcaatggttcaccttcgaagatgagaagccagaagattccaaatctgaagatgaaccagaatcctccgatcagaaatctgaaaaatctgctggttccgaagttgtcaagactgaatttccaggtttgctgaacttgaacttgtctattgctaagggtgaattcgttgttgttaccggttctattggttccggtaaatcttctttgttgaacgctttttccggctttatgccaaaaacttctggttctgttgctaagaacggttctttgatgttatgtggttatccatgggttcaaaacgctaccatcaaagaaaacatcgtgttcggtgaagaatacgaccaagaaaagtacgataccatcgttaaggtctgttctttgactggtgatttcgaacaattttccgctgctgataagactgaagttggtgaaagaggtattacattgtctggtggtcaaaaggccagaatcaatttggctagagcagtttattccgacaaggacatcatcttgttagatgacgttttgtcagctgttgatgccaaggttggtaaatctattatgaaggattgcatcatgggctacctgaaaaacaagactagagttttggctacccatcagttgtccttgattgattcagcagataagatcatgttcttgaacggtgatggtactgttgattacggtactttggacgaagttaagtctagaaacccagaattcgtcaggttgatggaattctctcataacgttgatgatgatgacgaggacgaaaatgaacctgaacaagaaaagaatgatgatttcggtgctgatgacgatgaagatggtagattgatcagagctgaagaaaaggctgttaacgctatttcttgggatgtttacagaacctacatcaaagctggttctggtaagttgggttacttttacccagttgtagttgttttggccttctctgtttctaccttctgtttgttgtttgtcaacaactggttgtccttttgggaatccggtaagtttcatgaaccaggttctttttacgagggcatctatattatgttcggcttcttgtgcctgatcttcttgatcgttgaattcttgttcttggtctacttctgtaacatggctgctagaagattcaacatcttggcttttaagaggttgttgcataccccaatgtctttcttggatacaactccaatgggtagagtcttgaacagattcactaaggatactgatgctatggacaacgaaatccaagaccaattcagacaattcttccaaccattggctactatcgttggtactttgatcttgtgtatcatctacttgccatggttcgctattgctattccaattgtctacgctctgttctacttgatctctaacttttacttggcctcctccagagaaatcaaaagattggaagctttgaagaggtccttcgtttactcccattttaacgaatctttgtccggtatggacactattaaggctcataactctgaaaccagattcttgaacactaacgcccacttgattaacgacatgaatgaatcttactacaccttcattgccgtccaaagatggttggcttctaacttggaattattggcttctttggtctgcttgctgatttgcttgttgtgcgtttttagggtgttcaacatttctggtgcttacaccggtttggtgttgacttacgttgttaatattgtcggcttggtgtccttcatgttgagatctatgaccgaagtcgaaaaccagatgaactctgttgaaaggttgaagttttacgccatcgacttgcaacaagaagctgcttacgatattccagaaagagatcctgaacctacttggccagcttctggtagtatttcatttcaagatgtctccatgagataccgtgaaggtttgccatatgctgttaagggtttgtctttggatgttgctggttcagaaaagatcggtatttgtggtagaactggtgctggtaaatcctctgttatgtactccttgtttagattggctgaattcgagggtaagattaccattgatggtgtcgatatttcccaaatcggtctgcataagttgaggaccaagatttccattattccacaagatccagtgttgttctctggtaatgtcagatctaatttggacccattcaacgacagaaccgatgaagaattatggtctgcattggaaaaagccggtttgatcgatggttctattttggaacaagtcaaaaagcagcaaaagaccgatgctaacttgcacaaattccacttggatagagtcgttgaagatgacggttctaatttctcattgggagaaagacaattgctggctttggcaagagctttggttagaggtgctagaatattggttttagatgaagccacctcttccgttgactacgaaacagatgctaaagttcaaaagaccattaccgaagaattcgctcaatgtactgttttgtgcattgcccatagattgaaaaccatcgtcaagtacgacaggatcttggttttggacaaaggtgaaattgccgaattggatactccaagaaacttgtacgaacagaacggtattttcagatccatgtgtgataagtccggtatcgtggaagatgatttctga

SEQ ID NO: 932 - protein, 1352 aa, Ogataea philodendri
MSVEETAGTNLALQKRSLTFLFGKKVPPLPLEEERKVFPHYHTNIIYRAFFWYLTPLMRVGYKRTLQPEDMYLLDEEQTIDYMYKKFIASVDSDLEKQKAKHILKKCKERGETPESSSVDPETDLEDFELHYVYLVKGLIRVFGWQYGWATFIKAFADLSSALLPLVLKRLINFVERKAYGLEPHVGKGIGYAFGVSLMVYFSGFAFNHFFYNSTTVGAKVKAVLTKALLEKSFTLDARGKHKFPIGKINSIMGTDLTRVDLALGFFPFLLGFPIPLIVIIVMLLVNIGVSALAGIGVFVMSIFLTGFIVRELFRLRVIANVFTDERVNLVKELLKNFKMIKMYGWENSYFKEFMDIRQKEMTTVLRMQVARNVLIAVAIWLPIVSSMVAFLVLHKIDSNRTVGDIFSSLSLFQELTTQFLMVPAALAMSTDMVIAFKRISQLLSCPDGQELATFFDTLDDPKLALQLKNASFQWFTFEDEKPEDSKSEDEPESSDQKSEKSAGSEVVKTEFPGLLNLNLSIAKGEFVVVTGSIGSGKSSLLNAFSGFMPKTSGSVAKNGSLMLCGYPWVQNATIKENIVFGEEYDQEKYDTIVKVCSLTGDFEQFSAADKTEVGERGITLSGGQKARINLARAVYSDKDIILLDDVLSAVDAKVGKSIMKDCIMGYLKNKTRVLATHQLSLIDSADKIMFLNGDGTVDYGTLDEVKSRNPEFVRLMEFSHNVDDDDEDENEPEQEKNDDFGADDDEDGRLIRAEEKAVNAISWDVYRTYIKAGSGKLGYFYPVVVVLAFSVSTFCLLFVNNWLSFWESGKFHEPGSFYEGIYIMFGFLCLIFLIVEFLFLVYFCNMAARRFNILAFKRLLHTPMSFLDTTPMGRVLNRFTKDTDAMDNEIQDQFRQFFQPLATIVGTLILCIIYLPWFAIAIPIVYALFYLISNFYLASSREIKRLEALKRSFVYSHFNESLSGMDTIKAHNSETRFLNTNAHLINDMNESYYTFIAVQRWLASNLELLASLVCLLICLLCVFRVFNISGAYTGLVLTYVVNIVGLVSFMLRSMTEVENQMNSVERLKFYAIDLQQEAAYDIPERDPEPTWPASGSISFQDVSMRYREGLPYAVKGLSLDVAGSEKIGICGRTGAGKSSVMYSLFRLAEFEGKITIDGVDISQIGLHKLRTKISIIPQDPVLFSGNVRSNLDPFNDRTDEELWSALEKAGLIDGSILEQVKKQQKTDANLHKFHLDRVVEDDGSNFSLGERQLLALARALVRGARILVLDEATSSVDYETDAKVQKTITEEFAQCTVLCIAHRLKTIVKYDRILVLDKGEIAELDTPRNLYEQNGIFRSMCDKSGIVEDDF

SEQ ID NO: 933 - DNA, 4146 bp, Artificial
  source 1..4146: mol_type = other DNA
atgacctctccaggttctgaaaagtgtactccaagatctgatgaagatttggaaagatccgaaccacaattgcaaagaagattattgaccccattcctgttgtctaaaaaggttccaccaattccaaaagaggacgagagaaaaccatatccatacctgaaaactaaccccttgtctcaaattttgttctggtggttgaatcccttgttgagagttggttacaagagaactttggacccaaacgatttctactacttggaacactcccaagatattgaaaccacctactctaactacgaaatgcacttggctagaatcttggaaaaggatagagctaaagctagagctaaggatccaactttgacagacgaagatttgaagaacagagagtatccaaagaacgctgttattaaggctttgttcttgaccttcaagtggaagtatttgtggtccatcttcctgaagttgttgtccgatatagttttggtcttgaaccccttattgtccaaggctttgattaacttcgttgacgagaagatgtacaacccagatatgtctgttggtagaggtgttggttatgctattggtgttactttcatgttgggtacatccggtattttgatcaaccacttcttgtacttgtctttgactgttggtgctcattgcaaagctgttttgactactgctatcatgaacaagtctttcagagcttccgctaaatctaaacacgaatatccttcaggtagagtcacctctttgatgtctactgatttggccagaattgatttggctattggttttcaaccattcgccattactgttccagttccaattggtgttgctattgctttgttgatcgttaacattggtgtttctgctttggctggtattgctgttttcttggtctgtatcgttgttatctctgcctcttctaagtccttgttgaaaatgagaaaaggtgctaaccagtacaccgatgctagaatttcttacatgagagaaatcctgcagaacatgaggatcatcaagttttactcttgggaagatgcctacgaaaagtctgttgttactgaaagaaactccgagatgtccatcatcttgaagatgcaatctatccgtaacttcttgttggccttgtctttatctttgccagccattatttctatggttgccttcttagtcttgtacggtgtttctaatgataagaacccaggcaacatcttcagctccatttctttgttttcagtcttggctcaacagaccatgatgttgccaatggctttggctactggtgctgatgctaaaattggtctagaaagattgagacagtacttgcaatccggtgacatcgaaaaagaatacgaagatcacgaaaagccaggtgatagagatgttgttttgccagataatgttgccgtcgaattgaacaacgcttctttcatttgggaaaagttcgatgatgccgatgataacgatggtaactctgaaaagaccaaagaagttgtcgttacctccaagtcatcattgactgattcttcccatatcgataagtctaccgattctgctgatggtgagtacattaagtctgttttcgaaggcttcaacaacatcaacttgaccattaagaagggtgagttcgttattatcactggtcctattggttccggtaagtcatctttgttggttgctttagctggctttatgaagaaaacctctggtactttgggtgtcaatggtactatgttgttgtgtggtcaaccatgggttcaaaactgtactgttagagacaacatcttgttcggtttggaatacgatgaagccagatacgatagagttgtagaagtttgtgctttgggtgacgacttgaaaatgtttactgctggtgatcaaaccgaaatcggtgaaagaggtattactttatctggtggtcaaaaggccagaatcaacttggcaagagctgtttatgctaacaaggacattatcttgttggacgatgttttgtctgctgttgatgctagagttggtaaattgatcgttgatgattgcctgacttctttcttgggtgacaaaactagaattttggctacccaccaactgtccttgattgaagctgctgatagagttatctacttgaacggtgatggtacaatccatatcggtactgtccaagaactgttggaatctaatgaaggcttcttgaagctgatggaattctccagaaaatccgaatccgaagatgaagaagatgtcgaagctgctaacgaaaaggatgtctctttacaaaaggccgtttctgttgtgcaagaacaagacgctcatgctggtgttttgattggtcaagaggaaagagcagttaacggtattgaatgggacatatacaaagagtacctacacgaaggtagaggtaagttgggtatttttgctattccaaccatcatcatgttgttggtcttggatgttttcacgtccattttcgttaacgtctggttgtctttttggatctcccataagtttaaggctagatccgatggtttttacatcggcttgtacgttatgttcgttatcttgtccgttatttggattaccgccgaatttgttgttatgggctacttttcatctaccgctgctagaagattgaacttgaaagctatgaagagagtcttgcataccccaatgcatttcttagatgttactccaatgggcagaatcttgaacagattcactaaggatactgacgtcttggacaacgaaattggtgaacaagccagaatgtttttacacccagctgcttatgttatcggtgtcttgattttgtgcatcatctacattccatggttcgctattgcaattccaccattggctattttgttcaccttcatcaccaacttctatatcgcctcttcaagagaagtcaagagaattgaagccatccaaaggtctttggtgtacaacaattttaacgaagtcttgaacggcttgcaaaccttgaaggcttataatgctacttcccgtttcatggaaaagaacaagcgtttgttgaacagaatgaacgaagcctacttgttggtcattgctaatcaaagatggatctccgttaacctggatttggtttcttgttgcttcgtgttcttgatctccatgttgtccgtttttagggtgttcgatatcaatgcttcttccgttggtttggttgttacttccgttttacaaatcggtggcctgatgtcattgattatgagagcttataccaccgtcgaaaacgaaatgaactctgttgaaagattgtgccattacgccaacaagttggaacaagaggctccttacattatgaacgaaactaagccaagacctacatggccagaacatggtgctattgagtttaaacatgcctccatgagatacagagaaggtttgccattggttttgaaggatttgaccatttcagtaaaaggtggtgagaagattggtatttgcggtagaacaggtgctggtaagtctactattatgaatgccttgtacaggttgaccgaattggctgaaggttctattactatcgatggtgtcgaaatttctcagttgggcttgtatgatttgagatccaagttggccattattccacaagatccagttttgttcagaggcaccattagaaagaatttggatccatttggtcagaacgatgacgaaactttgtgggatgctttaagaagatccggtttagttgagggttctatcttgaataccatcaagtcccaatctaaggatgatccaaacttccataagttccacttggatcaaactgttgaagatgagggtgctaacttttcattgggtgaaagacaattgattgcattggccagagctttggttagaaactctaagatcttgatcttggacgaagctacctcttctgttgattacgaaaccgattccaaaatccaaaagaccatctctactgaattctcccattgcaccattttgtgtattgcccatcgtctgaaaaccatcttgacctatgataggatcttggttttggaaaaaggtgaggttgaagaattcgatacaccaagggtcttgtactctaagaatggtgtctttagacagatgtgcgaaagatctgaaattacctctgctgatttcgtctaa

SEQ ID NO: 934 - protein, 1381 aa, Artificial
MTSPGSEKCTPRSDEDLERSEPQLQRRLLTPFLLSKKVPPIPKEDERKPYPYLKTNPLSQILFWWLNPLLRVGYKRTLDPNDFYYLEHSQDIETTYSNYEMHLARILEKDRAKARAKDPTLTDEDLKNREYPKNAVIKALFLTFKWKYLWSIFLKLLSDIVLVLNPLLSKALINFVDEKMYNPDMSVGRGVGYAIGVTFMLGTSGILINHFLYLSLTVGAHCKAVLTTAIMNKSFRASAKSKHEYPSGRVTSLMSTDLARIDLAIGFQPFAITVPVPIGVAIALLIVNIGVSALAGIAVFLVCIVVISASSKSLLKMRKGANQYTDARISYMREILQNMRIIKFYSWEDAYEKSVVTERNSEMSIILKMQSIRNFLLALSLSLPAIISMVAFLVLYGVSNDKNPGNIFSSISLFSVLAQQTMMLPMALATGADAKIGLERLRQYLQSGDIEKEYEDHEKPGDRDVVLPDNVAVELNNASFIWEKFDDADDNDGNSEKTKEVVVTSKSSLTDSSHIDKSTDSADGEYIKSVFEGFNNINLTIKKGEFVIITGPIGSGKSSLLVALAGFMKKTSGTLGVNGTMLLCGQPWVQNCTVRDNILFGLEYDEARYDRVVEVCALGDDLKMFTAGDQTEIGERGITLSGGQKARINLARAVYANKDIILLDDVLSAVDARVGKLIVDDCLTSFLGDKTRILATHQLSLIEAADRVIYLNGDGTIHIGTVQELLESNEGFLKLMEFSRKSESEDEEDVEAANEKDVSLQKAVSVVQEQDAHAGVLIGQEERAVNGIEWDIYKEYLHEGRGKLGIFAIPTIIMLLVLDVFTSIFVNVWLSFWISHKFKARSDGFYIGLYVMFVILSVIWITAEFVVMGYFSSTAARRLNLKAMKRVLHTPMHFLDVTPMGRILNRFTKDTDVLDNEIGEQARMFLHPAAYVIGVLILCIIYIPWFAIAIPPLAILFTFITNFYIASSREVKRIEAIQRSLVYNNFNEVLNGLQTLKAYNATSRFMEKNKRLLNRMNEAYLLVIANQRWISVNLDLVSCCFVFLISMLSVFRVFDINASSVGLVVTSVLQIGGLMSLIMRAYTTVENEMNSVERLCHYANKLEQEAPYIMNETKPRPTWPEHGAIEFKHASMRYREGLPLVLKDLTISVKGGEKIGICGRTGAGKSTIMNALYRLTELAEGSITIDGVEISQLGLYDLRSKLAIIPQDPVLFRGTIRKNLDPFGQNDDETLWDALRRSGLVEGSILNTIKSQSKDDPNFHKFHLDQTVEDEGANFSLGERQLIALARALVRNSKILILDEATSSVDYETDSKIQKTISTEFSHCTILCIAHRLKTILTYDRILVLEKGEVEEFDTPRVLYSKNGVFRQMCERSEITSADFV

SEQ ID NO: 935 - DNA, 4377 bp, Lachancea mirantina
  source 1..4377: mol_type = other DNA
atgcccacaataagacaagagctgcgtcactcttccagtggaagtgagaatgagaaagccgagtcgctatatgtcaagaacgaaggaaagcttgacaaagttgcaacgcagaacagttattatgaggtggaccgtaatagaccggagacttttatgaatagtgacgacttagagaaagtgacggagtcagagatatatccccagaaacgtatgtttagctttctacatagcaagaagataccaccgatccctactgacgaggagcgtcctgtgtatcccctattccacgcaaattggatatcaaggatattcttctggtgggtctttcccatcttaagggtcggatataaaaggactcttcagcctggagacttatggaaaatggacgacaggatgagtattgagactctatatgccgactttgagaggtatctggaagtgtatagggagaaagccagggttcaatataggaaggagcaccctaacgcgacagaagaggaaataatagagaatgctgtcatgcctaagcatactctggtcaaagtgcttttatatacatttaaatggcagtatttcttagccttcgccgcgatggcattatccaacgcagcatcagccttcttaccgatggttacaaagaggcttattgattttgtcagtgagaaaagcttctatcctgggttaaaagtgaacgcaggagtaggctacgccatcgggtcatgtgtcatgatgttactaaatggagtcctgttcaatcatttctttcacaatagtcagcttacgggcgtccaggctaaatctgtattaatcaaagccatacttactaaatctatgaaactttcaggctttagtaggcaccgttttcctagcggcaaaataacttccatcatgagtacggatttatctaggttagaactagcaataattttccagccgttactaggagcgttcttcgtggccgtcgcgatttgcatagttttattaatcataaatcttggcccgatagcccttgtcggggtgggcatattcgtcgtagcaatgttcttttccgcctatgcttttaaacgtctaatctctgtgaggaagaagacaaatatatttacagacgctcgtgtcactatgatgcgtgagatcttgaattcgatgaaaatgatcaaattttatgcatgggaagacgcatacgaggcatcagtgcacgatcaacgttcgaaggagataagcaaaacgaggattatgcaatttactaggaactttgtaaccgcattagcagtctgtttaactaatatctccagtatggtgacctttctagcattgtataaggtacgtaatcacggccgtacccctgctaatatattctccagcttaagtctgtttcaagttcttagcatacagatgttctttctacccatggcgttaggcacagccgtggacggatccatcgcacttaaccgttgtcaggaacttttcgaggccaccgaggaagagcatgacatagacgtagactttcccccttgcgacgaccccgacttagcacttaaggtagtaaatgggtcctttgagtggcaggacttcgaggctgaggagaataggttagcgacattaatggagatagaggagaagaagaagaagaaaacgaaaagtaagaaggacaaagcacccgagccaaagcacgaggcagcatcaataaaacccggccacctaagcgacacagagagagagtcattcaaagggtttcataatttaaatttcgaagttaagaagggcgaattaataattataaccggatctatcggcaccggcaagacaagtctgttaaacgcgttggccggatttatgcgtaaaacagagggagacgtatataagaatggttctctattactttgcggatacccgtgggtacagaatgcaacagtccgtgataacattctgtttggatccccgtacgacaaagctaggtataaagaggtcatacgtgtgtgctcgcttcaggctgacttagacatattacccgcgaatgacaaaacagagatcggagagaggggtattaccttatcaggcggacagaaggccaggataaatttagcgaggtctgtatataagtcaatggacacatatctgtttgacgacgtgctaagtgccgtggacgcacgtgtcggcaaacatatcatggacgagtgcatgttagggagattaggaaataagacgcgtatcttagccacacatcaattatcgttaatagaccgtgcaagccgtgtgatcttcttaggtactgacggatccttcgactttggatcagtcacggaacttaagaaacgtaatgcaggtttcaataaactaatggagtttgctaataaatcatcagataaggaagaaggagagctggacagtaccgaggcaagcggcgacgacgtttcaacagcagaggagttagagcattttagggacgacgacggccagcgtgagatggatgcgtctagattgaagaaggagttatcaaaacgttcgtatgaatctagtgtggatgagaacgaggccgcaggaaggctgatggcaaaggaagagcgtgcagtgaatagcatcggctttgatgtatataagaattatatatcggcaggagtgggaaagaaaggattcgtactgcttccattttatgtgattttacttgcagtcacgacattttcgcttctattcagtagtgtttggttatcattctggactgaagacaaattcaagaggcaggctggcttctatatgggtatgtatatattcttcgtattcttcaattacttttgcactaccggccagtttacattactttgctacctgggacttacagcgtcgaaaatgttaaacctgaaagcagtaaagaggattctgcacacacctatgtcatttatcgacacgacgcctatcggacgtattttaaataggtttaccaaagacacagacacattagacactgagctgaccgagtcggtcagactgtttgtgtatcagacagcaaatatcattggggtagtgataatgtgtattatttatctaccctggtttgcgatagcagtcccgtttcttgtaattatatttgcacttgtggccaatcattatcagagctcgtctagggagattaaaagattagaggctattcagaggagccacgtgtttaataattttaatgaggtgttgggcggcatcgatacgataagggcatatagagggcaggagcgttttctaatgaagaatgattttctaacaaataaaatgaacgaggccggatatttagtggtagctgtccagaggtgggtctccatcgctctggacatgatagcgatggcttttgcacttatcattgcattattgtgcgtcactaggcaatttcacatatcaccttcctcggtgggagtgttgctaacgtatgtattacagctgcccggattactaaatacgctaatgcgtgcaatgacgcagggagagaatgacatgaactcggctgagcgtctgatagcgtacgcaacagacttacctctggaagcaaactataggaaacctgagatgacccctgccgagccatggcctagccacggagagattgtgttcgacgacgtatcattagcctataggcctggactgcctttggtacttaagaatgtgtctattgacataggatcaggagagaaaattggaatatgcggacgtactggcgcaggaaaatcaacgatcatgaccgctttatacagaatttgtgagcttcactctggaaccgtatcaattgacggagtggatatctcgaaaattggactgtatgacttacgttcgaaattatccataatacctcaggacccggtgttatttaaagggagtatacgtcgtaatcttgacccctttaatgagagaactgacgagcagctttgggacgcccttgtcaggagcggcgcagtggaagcgtcagagatagccgaggtcaaagcccagtcgcccgagacatcaggagcatatgccaacatgcacaaatttcaccttaggcaggaagtagaggacgatggatcaaacttcagcctaggagaacgtcagctactagcgttaaccagggcccttgttaggcagtcgaaaatacttattctagacgaggcaacctcgtcggtcgactatgagacagacgccaaaattcaggcgaaaattgtacaggagttttcgagctgcacaatattatgtatcgctcaccgtctaaatactatcctagactatgacaggatattggtcctggagcaaggctcagtagcggagttcgacacgcctaaagcgttattccgtgctggcgggatattcacggagatgtgccagcgtagtggaataacttcggcagacttcaaggaaaattga

SEQ ID NO: 936 - protein, 1458 aa, Lachancea mirantina
MPTIRQELRHSSSGSENEKAESLYVKNEGKLDKVATQNSYYEVDRNRPETFMNSDDLEKVTESEIYPQKRMFSFLHSKKIPPIPTDEERPVYPLFHANWISRIFFWWVFPILRVGYKRTLQPGDLWKMDDRMSIETLYADFERYLEVYREKARVQYRKEHPNATEEEIIENAVMPKHTLVKVLLYTFKWQYFLAFAAMALSNAASAFLPMVTKRLIDFVSEKSFYPGLKVNAGVGYAIGSCVMMLLNGVLFNHFFHNSQLTGVQAKSVLIKAILTKSMKLSGFSRHRFPSGKITSIMSTDLSRLELAIIFQPLLGAFFVAVAICIVLLIINLGPIALVGVGIFVVAMFFSAYAFKRLISVRKKTNIFTDARVTMMREILNSMKMIKFYAWEDAYEASVHDQRSKEISKTRIMQFTRNFVTALAVCLTNISSMVTFLALYKVRNHGRTPANIFSSLSLFQVLSIQMFFLPMALGTAVDGSIALNRCQELFEATEEEHDIDVDFPPCDDPDLALKVVNGSFEWQDFEAEENRLATLMEIEEKKKKKTKSKKDKAPEPKHEAASIKPGHLSDTERESFKGFHNLNFEVKKGELIIITGSIGTGKTSLLNALAGFMRKTEGDVYKNGSLLLCGYPWVQNATVRDNILFGSPYDKARYKEVIRVCSLQADLDILPANDKTEIGERGITLSGGQKARINLARSVYKSMDTYLFDDVLSAVDARVGKHIMDECMLGRLGNKTRILATHQLSLIDRASRVIFLGTDGSFDFGSVTELKKRNAGFNKLMEFANKSSDKEEGELDSTEASGDDVSTAEELEHFRDDDGQREMDASRLKKELSKRSYESSVDENEAAGRLMAKEERAVNSIGFDVYKNYISAGVGKKGFVLLPFYVILLAVTTFSLLFSSVWLSFWTEDKFKRQAGFYMGMYIFFVFFNYFCTTGQFTLLCYLGLTASKMLNLKAVKRILHTPMSFIDTTPIGRILNRFTKDTDTLDTELTESVRLFVYQTANIIGVVIMCIIYLPWFAIAVPFLVIIFALVANHYQSSSREIKRLEAIQRSHVFNNFNEVLGGIDTIRAYRGQERFLMKNDFLTNKMNEAGYLVVAVQRWVSIALDMIAMAFALIIALLCVTRQFHISPSSVGVLLTYVLQLPGLLNTLMRAMTQGENDMNSAERLIAYATDLPLEANYRKPEMTPAEPWPSHGEIVFDDVSLAYRPGLPLVLKNVSIDIGSGEKIGICGRTGAGKSTIMTALYRICELHSGTVSIDGVDISKIGLYDLRSKLSIIPQDPVLFKGSIRRNLDPFNERTDEQLWDALVRSGAVEASEIAEVKAQSPETSGAYANMHKFHLRQEVEDDGSNFSLGERQLLALTRALVRQSKILILDEATSSVDYETDAKIQAKIVQEFSSCTILCIAHRLNTILDYDRILVLEQGSVAEFDTPKALFRAGGIFTEMCQRSGITSADFKEN

SEQ ID NO: 937 - DNA, 4221 bp, Candida auris
  source 1..4221: mol_type = other DNA
atggccgaattggaaaagggtgatgaagctcaaccagctttacaacatagattgtgtacacccttgttgtccaaaaaggttccaccagttccaagagatgaagatagaccagttcatccaaaagctaccaatccattctcttggtttttcttcacttggttgactccagttttgttgagaggttacaagagaactttgttgccagaggatatgttcaagttgcatgacgaaatgaccgttgaacatttggctggtaagttccaagctatcttcgatagaagattggctgctgataagaagaagtacttgaagagaagaaggcaattggccttgaagaaaggtgattctgatgtttctgctagaaccgacgaagatttgatgttggaatacgaaccatctaagtccctgtgtttcttgtccttgtacgaaacatttttgtggcaatactccatggctttgttgttcggtatgttgggtttagttggtcaagcttgtaatcctttgttgtcccgtaagttgattaacttcgttgaattggaagccttgggtatcccaacaaaaattggtactggtattggttacgctttcggtgttgctattttgatgtttgtttccgacgtcttgcacaatcaaggtgtttattttgctatgttgaccggtgctcaaattagagctattttcacaaaagccctgctggacaagtctttcaaattgaataccagatcgaggaagaagttcccaccatctaaaattacctccatcatgtctaccgatgtttccagagttgacttaggtacaggtttttctatctacggtttcgtcttgattttcccagttggtgtttccattggtatcctgatctacaatattaaggctccagctatggttggtgtcggtttgatgttagcttttgtttttgttagcggtggcttgtctaccttgttgttctcttttagaaaaactgctcaaaaggccaccgattctagagttggttatatgaaggaagtcctgaacaacctgaagatgatcaagttttactcttgggaaaagccataccatgccttgattactaagatcagacgtagagaaatggcctacttgttgagaatggaaattacccgtatgatcattattaccttggctgcttctttggccttggtttcatctttggtttctttcttgacgttgtacgctattgcttctccatcttctagaaatccagccgaaattttctcctccgtttctttgtttaacttgttggcctctcaattcttggtcttgccattgtctattgctggttctactgatgcatttttgggtatgaatagagttgctgctgttttagctgctgacgaaattgatccagaagatgctgataccatcttgtctgaaagaactcaagctttgttggaggaaaagaagttggctattactgttcaagacggtgaatttgaatgggagttgtttgatttcgacgacgaaaagtccgaagaaaaagaagaacataaggacgagagcaagaagaagaagaagaaagagtctaagaagaaggtcaaaaagtccgccaaagatgtctctgatacttcttcagcttcctctaacgaaaaagagaggaagtcttttaagctgcacaacgttaacttggacattagacaaggtgccttcgttgttattacaggttctattggttccggcaagtcatctttgttgcatgctttggatggtgccatgaagaaattgtctggtgatgtttacgttaacggctctttgttgatgtgtggtactccttggattcaatctgcttcattgagagagaacatcttgttcggttctacctatgacgagaagtggtacaaagaagttattagagcttgctccttggaatccgatttcgatattttgccagctggtgatttgaccgaaattggtgaaagaggtattactttgtccggtggtcaaaaggctagagtttgtttggctagaactgtttacgctaactcctccattatcttgttggatgatgttttgtctgctgttgatgccaaggttggtaaacatattatgtccgaatgcatcatgggtatcttgaagggtaaaactagagttttggctacccaccaattgtccttgatttctgaagctgaacacgtcattttcttgaacggtgatggtactatttccaggggtacttttgaagaattgaagtctaccaactctgccttcaaggctttgatggaacataacagaaagtctgaagagaacgatgaggatgaatcagaaccagcttctgaagttgaagcctctgaaaaagaattgatcaagagacagttgaccaagcaaactactacccaagtttcttccgattccgttgaaaaagtagaattggatggcaagttgtacgacgaagaagagaaatctgttaacgctattggttgggatgtttatggtcgttacattttgactggtgtccaaggttttaagttcaactggttgttgtttgtcatcctgtgcttgtgtattttgggcacttttatgtctctgttcaccaacaattggctgtctttttggatctccagaaagtttgatcaaccagccggtttttacattggtttttacgctgcttttaccggtttggctgttatcttgatggttttccagttctgctccatcatcttcgttatgaacagagcctctaggatcttgaacattaaggctttgggtaagatcttgcacgttccaatgtctttcatggatacaactccaatgggtagaatcttgaatagattcaccaaggataccgacaccttggataatgagattggtgatagagtcggtatggttgttaacttcactttcgaaatttggggcgttatcatcatgtgcattatctacatgccatggtttgctattgctgttccttttatcgttgccgtgttcattattatggctaacttctatcaagcctccggtagagaagttaagagattggaagctgttcaaagatcccacgtttacaacaacttcaacgaatctttaactggtatgccaaccattaaggccttcaagtccattcagagattcttgaacaagaacgttgccacgattaacaaaatggatgaagcttacttcgttaccgtcgctaatcaaagatggttggatacttacttgtctttgttggctactttgttcgccttgttgattgctttattgtgtgtctgcagagtgttcgatattggtgcttcagctgttggtttgttagtttcttatgtcttgcagatctccggcttgatttcaatgttggttgtcgttttcacccaagtcgaacaagacatgaattctgctgaaagagttatggactacgtctacaagattccacaagaaagaccatacgaaatctccgaaactagaccaccaccagaatggcctcaaaatggtgaaattagattcatcaacgtcgacttcgcttacagagaaggtttgccattgactttgagaaacattaacgccgatattaagccacacgaaaagattggtatttgcggtagaactggtgctggtaaatcttcaattatggtcgctttgttcagaatcgccgaattgacttctggttccattatgattgatggcatcgatgtttctactttgggcttgcatgaattgaggtccaacttgtctattatcccacaagatccagtcttgtttaagggcactatcagatctaatttggacccattcgaaactaagaccgatgatgaattatgggatactttgcgtagagctgatattattgatgctgcctctttggaacatgttaagactcaacgtgttggtgatgatgatttccataagttccacttggataacgaagttgacgatgaaggtgaaaacttctctttgggcgaaaaacaattggttgcatttgctagagctttggttagagataccaagatcattgtcttagatgaagccacctcttctgttgattatgccactgattctaaattgcagaaggccatcgttagggaattctctgatagaaccattttgtgcattgcccacaggttgaaaactatcttgcattacgatagagtcatcgtcatggaacagggtgaaatcaaagaattcgatactccatctcacctgtacaactctactggtacaatctttagacaaatgtgcgacaagtccggcatctctaaagaagatttttacgagtggtaa

SEQ ID NO: 938 - protein, 1406 aa, Candida auris
MAELEKGDEAQPALQHRLCTPLLSKKVPPVPRDEDRPVHPKATNPFSWFFFTWLTPVLLRGYKRTLLPEDMFKLHDEMTVEHLAGKFQAIFDRRLAADKKKYLKRRRQLALKKGDSDVSARTDEDLMLEYEPSKSLCFLSLYETFLWQYSMALLFGMLGLVGQACNPLLSRKLINFVELEALGIPTKIGTGIGYAFGVAILMFVSDVLHNQGVYFAMLTGAQIRAIFTKALLDKSFKLNTRSRKKFPPSKITSIMSTDVSRVDLGTGFSIYGFVLIFPVGVSIGILIYNIKAPAMVGVGLMLAFVFVSGGLSTLLFSFRKTAQKATDSRVGYMKEVLNNLKMIKFYSWEKPYHALITKIRRREMAYLLRMEITRMIIITLAASLALVSSLVSFLTLYAIASPSSRNPAEIFSSVSLFNLLASQFLVLPLSIAGSTDAFLGMNRVAAVLAADEIDPEDADTILSERTQALLEEKKLAITVQDGEFEWELFDFDDEKSEEKEEHKDESKKKKKKESKKKVKKSAKDVSDTSSASSNEKERKSFKLHNVNLDIRQGAFVVITGSIGSGKSSLLHALDGAMKKLSGDVYVNGSLLMCGTPWIQSASLRENILFGSTYDEKWYKEVIRACSLESDFDILPAGDLTEIGERGITLSGGQKARVCLARTVYANSSIILLDDVLSAVDAKVGKHIMSECIMGILKGKTRVLATHQLSLISEAEHVIFLNGDGTISRGTFEELKSTNSAFKALMEHNRKSEENDEDESEPASEVEASEKELIKRQLTKQTTTQVSSDSVEKVELDGKLYDEEEKSVNAIGWDVYGRYILTGVQGFKFNWLLFVILCLCILGTFMSLFTNNWLSFWISRKFDQPAGFYIGFYAAFTGLAVILMVFQFCSIIFVMNRASRILNIKALGKILHVPMSFMDTTPMGRILNRFTKDTDTLDNEIGDRVGMVVNFTFEIWGVIIMCIIYMPWFAIAVPFIVAVFIIMANFYQASGREVKRLEAVQRSHVYNNFNESLTGMPTIKAFKSIQRFLNKNVATINKMDEAYFVTVANQRWLDTYLSLLATLFALLIALLCVCRVFDIGASAVGLLVSYVLQISGLISMLVVVFTQVEQDMNSAERVMDYVYKIPQERPYEISETRPPPEWPQNGEIRFINVDFAYREGLPLTLRNINADIKPHEKIGICGRTGAGKSSIMVALFRIAELTSGSIMIDGIDVSTLGLHELRSNLSIIPQDPVLFKGTIRSNLDPFETKTDDELWDTLRRADIIDAASLEHVKTQRVGDDDFHKFHLDNEVDDEGENFSLGEKQLVAFARALVRDTKIIVLDEATSSVDYATDSKLQKAIVREFSDRTILCIAHRLKTILHYDRVIVMEQGEIKEFDTPSHLYNSTGTIFRQMCDKSGISKEDFYEW

SEQ ID NO: 939 - DNA, 4146 bp, Kuraishia capsulata CBS 1993
  source 1..4146: mol_type = other DNA
atgtccgaaccaccaagacagaagagaattttgtcttgggctttgtctaaaaaggtcccaccaattactcaagaagaggacagattggaatacccattcaagagagctaacatcctgtccaagattttcttctcttggttggatcctttgttgcacaagggttatagaagaactttggaacctgaagatttgtggtacttgaccgatgaattgaagttggaacattactactccgttttcttggctcaattcgaaccagatttggctgctagaagagaagctcatttggaagctaaatgtaaggctagaggtgaaactttcgaaacttctactgttaccgaagatgaggatttggccgattttgtttatccatggccaaagttcggtctgatcttgttgaaaactttcttcagacaatacgttggtgcctgcgttttgaaaactattggtgatttggcttctactactgctcccttgttgcaaaaagctttgattaactacgttaccaagagagccaaaggtttggagccaaatgttggtactggtgttggttatgctattggttgtgctttgttcgttactttggaaggtttgatggtcaaccattacttctaccatgctatggttactggttctcaagttaaggctattctgaccaagttcatgttggaaaagtctttcagacaaaccggtagatccagacatgattttccaactggtaaggtcaactccattatgggtactgatttggccagaattgatttcgcaattggtttcttgccattcttgttctgttttccagttccagctattgtctccatcgttttgttgatcatcaatatcggtccatcctccttggttggtattgccattttctttttggctttgattgctttgggttccaccatcaaaagattgatgttcttcagattgagggccaacaagtttactgatggtagagtcaatttggtcaaagagctgttgaagaacttcaagatgatcaagtactactcctgggaaccatcttacgttaagaacattgaagaaaccagaaccgccgaaatgcacaatgttttcttgatgcaaatcatgaggaacatcatggttgctttcgctattgctttgccaactgtttgctctatgatttcctttttggtcttgtacggcatcaactcctctagatctgttgctgatattttctcctccttgaccttgtttcaagtcttggctatgcaattgatcatggtcccattggctttggcatctggttctgatgctttaattggtatcagaagagtcttggaattcgtttgctctggtgatatcgatgaagaagattcccaagtcgaactgtccttgatcaaagaaaagatggaatcctctggttccgttttgagagttgttaatgcttctttcgaatgggaaaccttcgatgctgacgaagaagatattgcttctaccaacgaatccgtgtctgaaaacgaaagaaaaccagatccatccttggaaggtctagaatctacatcttttccaggcttgaacaacatcaacctggatattagaaagggtgaattcgttgttgtcaccggtttgattggttctggtaaatcttctttgttgtacgccttgtctggtttcatgcatagaactcaaggtcatgttgctacaatcggtgatttgttgttgtgtggtaatccctggattcaaaatgctaccgttaaggacaatatcagcttcggtatgccatttgaccaacaaaagtacgataacgtcattcacgcttgttcattggaagcagatttggatttgttgccagctggtgatcatactgaagttggtgaaagaggtattactttgtctggtggtcaaaaggctagattgaatttggctagagctgtttatgccgatagagacattatcttgttggacgatattttgtccgctgttgatgctagagttggtaagcacattatggatgaatgtttgttgggtctgttgaaggataagaccagattattggctacccatcagttgtctttgatttctgctgctgatagagtcatcttcttgaacggtgatggttctattgatgtaggtactaccgctgaattgctggctagaaatgaaggttttaccaagctgatggaattcagcactcaagaaaagaacgataccactactgaatctggtgaagctgctcattcaggtccagaattggaagatgagaaagaattgatcagaatccagaccttgactaagtctttggctgaagctgaatctaactctgactaccaacataaggatgctgatggtgttttgatgcagttggaagatagagccgttaacgctattgaattgggtgtttacggtaaatacttgaagttaggtgctggtgcttttggtattggtattatccctttgttgttaggtttggttgcttgctctgtcttttgttctttgttcactaacacctggttgactttctggactgaaaagaaattcgataggtccaacggtttctttatcggtatctacgttatgttcaccatgctgactatcgttttcatggtcttggagttcagcttgttggtttacttgactaatactgcctctaggctgttgaacatctacgctattagaaggttgatgcacgttccaatgtctttcatggatacaactccaatgggtagaatcttgaacagattcactaaggataccgatgtcttggataacgaattgccagaacaaattaggttgttggttcatttcaccggtactatcactggtattttggttttgtgcatcatctacttgccatggttcgctatttctgttccaattttggccttctgctatattgcttgcgcttcttattatcaagcttccgctagagaagtcaagagaattgaagctttacagaggtccttcgtctactccaattttaacgaaacattgcaaggcatggaagttattactgcttacaaagctgagaagaggtttatcgcaagaaacgatgcattgatcgacaagatgaacgaagcttactacttgactttcgctaacatgagatggttgtccattagaattgatgttttggctgcagtcttggtcttgattgtctctttgttatgcgtcatgagagtgttccatatttctccagcttcagtcggtttgttattgtcttacactttgaacattgccggcatgatgtctatgttgttgaacgtttctacccagatcgaaaacgagatgaactctgttgaaagattggagtactacggtttcagagttgtacaagaagccccattcaaaatctctgaaaagactccaccaccagaatggccacacgatggtagaattcagtttgaaaatgttaccttgtgctacagacaaggtttaccagctgttctgaagaatttgaacatggatgttaagggtgccgaaaagattggtatttgcggtagaactggtgcaggtaagtcatctattatgactgccttgtatagattggccgaaatggaatcaggtggtaggattttgatcgatgatattgacatttctaccttgggcttgcacgatttgagatccagattgtctattatcccacaagatccagttttgttcagaggttctattagaggtaacttggatccattccatgaacacaaagacgaattattgtgggatgccttgagaagatccggtttaattgaaggttctaagttggatcaagtgaagcaccaaactttggatgacgaaaacttgcataagttccacttgggtcaaaacgttgaagatgatggtacaaacttcagcttgggtgaaagacaattgctagctttagctagagctttggtgagaaactctaagatcttgattttggatgaagccacctcctctgttgattacgaaactgattctaagatccaaaccaccatctctactgaatttgctggttgtactattatgtgcattgcccacagattgaaaaccatcgttaactacgataggatcctggttttggataagggtgaaatttccgaatttgataagccatgggccttgttccaagatgaatctactattttcaggcagatgtgtaacaagtctggtgttgttgcagaagatttcgagaagcaaaactaa

SEQ ID NO: 940 - protein, 1381 aa, Kuraishia capsulata CBS 1993
MSEPPRQKRILSWALSKKVPPITQEEDRLEYPFKRANILSKIFFSWLDPLLHKGYRRTLEPEDLWYLTDELKLEHYYSVFLAQFEPDLAARREAHLEAKCKARGETFETSTVTEDEDLADFVYPWPKFGLILLKTFFRQYVGACVLKTIGDLASTTAPLLQKALINYVTKRAKGLEPNVGTGVGYAIGCALFVTLEGLMVNHYFYHAMVTGSQVKAILTKFMLEKSFRQTGRSRHDFPTGKVNSIMGTDLARIDFAIGFLPFLFCFPVPAIVSIVLLIINIGPSSLVGIAIFFLALIALGSTIKRLMFFRLRANKFTDGRVNLVKELLKNFKMIKYYSWEPSYVKNIEETRTAEMHNVFLMQIMRNIMVAFAIALPTVCSMISFLVLYGINSSRSVADIFSSLTLFQVLAMQLIMVPLALASGSDALIGIRRVLEFVCSGDIDEEDSQVELSLIKEKMESSGSVLRVVNASFEWETFDADEEDIASTNESVSENERKPDPSLEGLESTSFPGLNNINLDIRKGEFVVVTGLIGSGKSSLLYALSGFMHRTQGHVATIGDLLLCGNPWIQNATVKDNISFGMPFDQQKYDNVIHACSLEADLDLLPAGDHTEVGERGITLSGGQKARLNLARAVYADRDIILLDDILSAVDARVGKHIMDECLLGLLKDKTRLLATHQLSLISAADRVIFLNGDGSIDVGTTAELLARNEGFTKLMEFSTQEKNDTTTESGEAAHSGPELEDEKELIRIQTLTKSLAEAESNSDYQHKDADGVLMQLEDRAVNAIELGVYGKYLKLGAGAFGIGIIPLLLGLVACSVFCSLFTNTWLTFWTEKKFDRSNGFFIGIYVMFTMLTIVFMVLEFSLLVYLTNTASRLLNIYAIRRLMHVPMSFMDTTPMGRILNRFTKDTDVLDNELPEQIRLLVHFTGTITGILVLCIIYLPWFAISVPILAFCYIACASYYQASAREVKRIEALQRSFVYSNFNETLQGMEVITAYKAEKRFIARNDALIDKMNEAYYLTFANMRWLSIRIDVLAAVLVLIVSLLCVMRVFHISPASVGLLLSYTLNIAGMMSMLLNVSTQIENEMNSVERLEYYGFRVVQEAPFKISEKTPPPEWPHDGRIQFENVTLCYRQGLPAVLKNLNMDVKGAEKIGICGRTGAGKSSIMTALYRLAEMESGGRILIDDIDISTLGLHDLRSRLSIIPQDPVLFRGSIRGNLDPFHEHKDELLWDALRRSGLIEGSKLDQVKHQTLDDENLHKFHLGQNVEDDGTNFSLGERQLLALARALVRNSKILILDEATSSVDYETDSKIQTTISTEFAGCTIMCIAHRLKTIVNYDRILVLDKGEISEFDKPWALFQDESTIFRQMCNKSGVVAEDFEKQN

SEQ ID NO: 941 - DNA, 4377 bp, Scheffersomyces stipitis CBS 6054
  source 1..4377: mol_type = other DNA
atgtccgactacgacttggaagaaaaccatttggttagacagaacaggctgttgtcctctttgttctctaaagaattgcctccaattccagaagatgacgaaagaccagaacatccagaaagagatgctaacttcttcagcaagattttcttctggtggatgatcccagttatgaacactggttacaagagaactttgaccccaaaggatttgttcaccttgtccgatgatattaaggttgaaactatggctgctaggtttatggctattttcacctctgatgttgaaagggccaaattgaaacacgttaagaaaaagtgtaagaagaggggcgaaaccttggaatcttcttctgttgatttcgataccgacgtcgaagattttaaggtttccccaattatgttcttcttcaccatctggaaaacctacaagtaccaatactttgctgcttctgtttgcttggctattgctaattctgctcaagctgttaaccctctgttgttcaaaaagttgattacctacgttggtttgaaggcctacggtattgaacaaggtgttggtaaaggtgtcggttatgctattggttcttgcttgattgaattcttgggtgccgttttgttcaaccacttcttttacaaagctatgatgaccggtgctgaaactaagggtgttttgacaaaagctttgttggagaagtccttcagattgtccgctgaatctaaacataagttcccagttggtaagatcacctctatgatgggtactgatttgtccagaattgatttggccttgggtttacaaccattcatcttcgtttttcccattccaatcgttatctccattgccatcttgatcgttaacattggtgctgttgctttgattggtatcggtgttatgttgttgttcatggctgttattggtggtactactgctaagttgtactcctatagaactaaggctaacaagtacaccgatatcagagtctcttacatgaaggaagtcctgaacaacttgaagatgatcaagttctattcttgggagccaccttactacgaaaacatttcttctactaggaccaaagagatggacatcatctacaacatgcaaaccttgagatctatcgttactgctttggctatgtctttgactggttttgcttctttggttgccttcttggttttgttcgctgttgataatgatagaaagaacccagcctccatcttctcctcaatttctttgtttaacgtcttgctgacccaggtctttatgttgccaatggctttagctacttctgctgatgcttttgctggtgtaggtagagtttctactttcttgactactggtgaagtcgacccaaaagaattggaaactgatatttcagccgacgtcttgcagagaatggacaaagaagatgttgttatcgaagtgaacaacgcctcttttgaatgggagattttcgaagatatcgaagagaaggacccaaagaaagagaaagaggaaaagaaaaaggctaaaaaggccgccaaagagactaagaaattggctaaacaagccaagaactcccaaactattactccatccgaagaagagttgtccaagattgattctccaaagttcaccgagaaagaattgtctaccgaatccaagtctgttgaggaaaaagttttcgccggtctgaacaacattaacctgtctattaagaagaacgagttcgttgttatcaccggtatgattggttctggtaagacttctttgttgaatgccttgtccggctttatgaagaaaacttccggtgaagttctggtcagttcatctttgttgttgtgtggttacccatggattcaaaacactaccgttagagagaatatcgttttcggttctgaatgggacgaagaaaagtacaacagagttattttcgcctgctctttggaatccgacattgaaattttgccaggtggtgatttgaccgaaattggtgaaagaggtattactttgtctggtggtcaaaaggctagaatcaacttagctagagctgtttatggtggtagggaaatcattttgatggatgatgttttgtctgccgttgatgctagagttggtaaacacattatgaacaactgcatcctggatctgttgaaggattctactagaattttggctacccaccagttgtctttgatagattctgcagatagggtcatcttcctaaatggtgatggttctatttccgtcggtacaaacgaagaattgcaaaagtctaatccaggtttcgctgctttgatggctcataatgctaaaactgaagaggacgatgaagatgagaagatcgatgttgatttggacaagcaaaagttcgaagaacaccacgaagttgagaaagagttgattcagagacaagttactagagcctctgctgttgatgaagaagctattagaaaggactacaacaagaacgtggaagaagatggtcatttgatcgaagatgaggatagaggtgttaacgctattgctttggatgtttacttgacctacgttaagttaggttccggtaagtatactgcttggggtatagttccacctatgttagtttttatggctttggccactttctgccaaattttcactaatacctggttgtctttttggaccgagaacaaattctctggtaaggatgataacttctacatcggtatctacgttatgttcaccgtcttgtcttttgttttcctggctttggaattcatgtccttggtttacatgactaataccgctgctgtcaagttgaatattgctgctgttcaaaaggttctgaaggttcctatggcttttatggatacaactccaatgggtagaatcttgaacaggttcactaaggatactgacgttttggataacgaaatcggtgaacagattaacttcgccttgttcatgttgtctaacgttgttggtattatcatcttgtgcattatctacttgccatggtttgctattgctgtcccatttttgggtttcatgtttatcgctgtctccaactattatcaagcttccgctagagaaatcaagagattggaagctgtttctaggtcctttgtctacaacaactttaacgaagtcttgaacggtatcaacaccattaacgcttataaggccgaatccagatttgttgctaagaacgacagattgatcaacggtatgaacgagtcttactacttgaccatcggtaatcaaagatggttgggtattcagatgaacattattgccgtcctgttctccttgttgattgctttgttatgcgtgaacagggttttcaagatttctccagcttctgtcggtctgttgttgtcttatgtattttctatcggtggcaccctgtccatgttgattagaacttttacacaggtcgagaacgagatgaattccgttgaaagaatctcctactactcgttctctttgccacaagaagctccatcttacattactgaaaattctccaccaccagaatggccagctaaaggtgaaattcatttcaaggatacctcattggcttacagaccaggtttgccattggttttgaagaacttgaacttctccattaagggctccgaaaagattggtatttgtggtagaactggtgccggtaaatcttctattatgactgccttgtacaggctgtctgaattggatggtggttcaattgtcattgatgacatcgatatttctaccttgggcttgcatgatttgaggtccaagttgtctattatcccacaagatccagtcatgttcagaggtactattaggaaaaacttggatccattcgatcaatccaccgatgatcaattgtggggtgctttagttagaacaggtttggttgaagctgatagattggatgttgtaaaggctcaagttaaggtgcagaaagaagataagtctgatcacggtgacaacaacaatggtgctgataagaaaggtgccgaagaaggttctatcttgcataagtttcacttggatcaaatggttgaggatgaaggtgtcaatttctcattgggtgaaagacaattgattgcctttgctagagccttggtcagaaattccaagattttgattttggacgaagccacctcttccgttgattacgaaactgatgctaagatccaaaactccatcgttaatgaattcgccgattgcaccattttgtgcattgctcatagactgaaaaccatcatcaactacgataagatcctggtcttggataagggtgagatcaaagagtttaataccccttggaacttgtttaagaccaaggactccattttccaacagatgtgcattaagtccaacatcgttgaagaggatttccacagagtgtctaagttctga

SEQ ID NO: 942 - protein, 1458 aa, Scheffersomyces stipitis CBS 6054
MSDYDLEENHLVRQNRLLSSLFSKELPPIPEDDERPEHPERDANFFSKIFFWWMIPVMNTGYKRTLTPKDLFTLSDDIKVETMAARFMAIFTSDVERAKLKHVKKKCKKRGETLESSSVDFDTDVEDFKVSPIMFFFTIWKTYKYQYFAASVCLAIANSAQAVNPLLFKKLITYVGLKAYGIEQGVGKGVGYAIGSCLIEFLGAVLFNHFFYKAMMTGAETKGVLTKALLEKSFRLSAESKHKFPVGKITSMMGTDLSRIDLALGLQPFIFVFPIPIVISIAILIVNIGAVALIGIGVMLLFMAVIGGTTAKLYSYRTKANKYTDIRVSYMKEVLNNLKMIKFYSWEPPYYENISSTRTKEMDIIYNMQTLRSIVTALAMSLTGFASLVAFLVLFAVDNDRKNPASIFSSISLFNVLLTQVFMLPMALATSADAFAGVGRVSTFLTTGEVDPKELETDISADVLQRMDKEDVVIEVNNASFEWEIFEDIEEKDPKKEKEEKKKAKKAAKETKKLAKQAKNSQTITPSEEELSKIDSPKFTEKELSTESKSVEEKVFAGLNNINLSIKKNEFVVITGMIGSGKTSLLNALSGFMKKTSGEVLVSSSLLLCGYPWIQNTTVRENIVFGSEWDEEKYNRVIFACSLESDIEILPGGDLTEIGERGITLSGGQKARINLARAVYGGREIILMDDVLSAVDARVGKHIMNNCILDLLKDSTRILATHQLSLIDSADRVIFLNGDGSISVGTNEELQKSNPGFAALMAHNAKTEEDDEDEKIDVDLDKQKFEEHHEVEKELIQRQVTRASAVDEEAIRKDYNKNVEEDGHLIEDEDRGVNAIALDVYLTYVKLGSGKYTAWGIVPPMLVFMALATFCQIFTNTWLSFWTENKFSGKDDNFYIGIYVMFTVLSFVFLALEFMSLVYMTNTAAVKLNIAAVQKVLKVPMAFMDTTPMGRILNRFTKDTDVLDNEIGEQINFALFMLSNVVGIIILCIIYLPWFAIAVPFLGFMFIAVSNYYQASAREIKRLEAVSRSFVYNNFNEVLNGINTINAYKAESRFVAKNDRLINGMNESYYLTIGNQRWLGIQMNIIAVLFSLLIALLCVNRVFKISPASVGLLLSYVFSIGGTLSMLIRTFTQVENEMNSVERISYYSFSLPQEAPSYITENSPPPEWPAKGEIHFKDTSLAYRPGLPLVLKNLNFSIKGSEKIGICGRTGAGKSSIMTALYRLSELDGGSIVIDDIDISTLGLHDLRSKLSIIPQDPVMFRGTIRKNLDPFDQSTDDQLWGALVRTGLVEADRLDVVKAQVKVQKEDKSDHGDNNNGADKKGAEEGSILHKFHLDQMVEDEGVNFSLGERQLIAFARALVRNSKILILDEATSSVDYETDAKIQNSIVNEFADCTILCIAHRLKTIINYDKILVLDKGEIKEFNTPWNLFKTKDSIFQQMCIKSNIVEEDFHRVSKF

SEQ ID NO: 943 - DNA, 2070 bp, Capra hircus
  source 1..2070: mol_type = other DNA
atgatggaccaaaaccaccactctgataagactgctgaagctcaaccatctgaaaagagaaagactagaaactgctgtaacggcttcaagatgtttttggctgctttgtccttgtccttcatttctaaagctttgggtgccatcatcatgaagtcctctattacccaaatcgaaagaaggttcgacatctcttcttctaccgttggtttgattgatggttccttcgaaattggtaacttgctggttatcgtgttcgtttcttactttggtgctaagttgcataggccaaagttgattggtattggttgtatcgttatgggcaccggttctattttgactgctttaccacatttcttcatgggctactacagatactctaaggataccacttttaacccctctgaaaactctacttctaacttgccaacctgctctattaaccagtctttgttgccaaacagaacctccttggaagttgttgaaaaaggttgggaaaaagactccggttcttatatgtggatctacgttttgatgggtaacatgttgagaggtattggtgaaactccaattggtccattgggtatctcttacattgatgattttgccgaagaaggccactcttcattatacttgggtaatttgttggccgttaccatgattggtccaattattggtttcgtcttggtgtcccaattctccaagatgtatgttgatatcggttacgttgacttgtccaccattagaattactccaaaggattctagatgggttggtgcttggtggttgggtttcttagctgctggtttgatctccattattagctctatccctttcttcttcctgccaaaaactttggacaaacccaacaaagaaaagaaggcttccgtttcctctatctctttgccaatgaagaacgaagaaaagtcccaaatggcttctttgactaagactggtcaaaacgttactgataccattaccggtttcttgcagtccttgaaatccattttgactaaccccttgtacgtcttgactttgtttttgaccttgttgcaagcctcctctcatattggttctgttacttacgttttcaagtacgtcgaacaacagtacggtaattctgcttctgaaacctccattttgttgggcttcattaccattccatcattggctgctggtatgtttacaggtggttttattgtcaagaagttcaagttcaccttggttggtattgccaagttctctttgtgtacccatttgatgtctttcttgttccacttgttgaacttcgctttgatctgcgaaaacaaatctgttgcaggtttgactttgacctacgatggtaatactccagttgcttctcatgttaacgttccattgtcttactgtaactctgattgcaactgtgatccaactcaatgggaaccattgtgtggttcaaatggtattacttacatctctccatgtttggctggttgtacatcttctactggttctaagaagtccatcgttttccataactgttcttgcgttgaagaaaacggtttccagtctaagaacaactctatgaagttgggtgaatgcccaaaatctgatgattgcagaagaaagttctacatctacatcgtcgttcagatcttgaccttattttctgctgctttgggttccacctctaacattatgttgatcttcaagaacgtggaacccgagttgaaatctttggctatgggttttcattccttgaccatcagaactttaggtggtattccagctccaatctatttcggtgctttaattgatagagcttgcatgaagtggtcgatcaacaattatggtaagcaaggttcttgcaggatctacaactctttgttgtatggtcatactttcttcggtttgactaccggtttgaaatttccagctttggttttgttcgtcgttttgattttcgctatgaagaagaagtaccaaggcaaggatattaaggcctcagaaaacgaaactaaggctgttaatgaagctaactccggcttgttgattaacgatgctaaagttgatcacgaaacccacatctga

SEQ ID NO: 944 - protein, 689 aa, Capra hircus
MMDQNHHSDKTAEAQPSEKRKTRNCCNGFKMFLAALSLSFISKALGAIIMKSSITQIERRFDISSSTVGLIDGSFEIGNLLVIVFVSYFGAKLHRPKLIGIGCIVMGTGSILTALPHFFMGYYRYSKDTTFNPSENSTSNLPTCSINQSLLPNRTSLEVVEKGWEKDSGSYMWIYVLMGNMLRGIGETPIGPLGISYIDDFAEEGHSSLYLGNLLAVTMIGPIIGFVLVSQFSKMYVDIGYVDLSTIRITPKDSRWVGAWWLGFLAAGLISIISSIPFFFLPKTLDKPNKEKKASVSSISLPMKNEEKSQMASLTKTGQNVTDTITGFLQSLKSILTNPLYVLTLFLTLLQASSHIGSVTYVFKYVEQQYGNSASETSILLGFITIPSLAAGMFTGGFIVKKFKFTLVGIAKFSLCTHLMSFLFHLLNFALICENKSVAGLTLTYDGNTPVASHVNVPLSYCNSDCNCDPTQWEPLCGSNGITYISPCLAGCTSSTGSKKSIVFHNCSCVEENGFQSKNNSMKLGECPKSDDCRRKFYIYIVVQILTLFSAALGSTSNIMLIFKNVEPELKSLAMGFHSLTIRTLGGIPAPIYFGALIDRACMKWSINNYGKQGSCRIYNSLLYGHTFFGLTTGLKFPALVLFVVLIFAMKKKYQGKDIKASENETKAVNEANSGLLINDAKVDHETHI

SEQ ID NO: 945 - DNA, 3978 bp, Ovis aries
  source 1..3978: mol_type = other DNA
atgcaaccagtttacccagaggttaagccaaatccattgagaaatgctaacttgtgctccagagttttcttttggtggttgaatcctttgttcaagatcggtcataagagaagattggaagaggatgatatgtactccgttttgccagaagatagatctcaacatttgggtgaagaattgcaaggttactgggatcaagaagttttgaaggctgaaaaggatgctagagaaccatctttgactaaggccattattaagtgctactggaagtcctatgttgtcttgggtattttcaccttgatcgaagaatctaccagagttgttcagccaattatcttgggtaagatcatcggttacttcgaaaactacgatccatctgattctgctgcattatatgaagctcatggttatgctggtgttttgtctgcttgtactttggttttggctatcttgcatcacttgtacttctaccatgttcaatgtgctggtatgagattgagagttgctatgtgtcatatgatctacagaaaggccttgaggttgtctaattctgctatgggtaaaactactaccggtcaaatcgttaacttgttgtccaacgatgttaacaagttcgaccaagttaccatcttcttgcatttcttgtgggctggtccattgcaagctatagttgttactgctttgttgtggatggaaatcggtatttcttgtttagctggtatggccgttttgatcattttgttgccattgcaatcttgtatcggcaagttgttctcttcattgagatcaaagactgctgctttcaccgacactagaattagaactatgaacgaagttatcaccggcatcagaatcattaagatgtacgcttgggaaaagtccttcgctgatttgattaccaacctgagaagaaaagagatctcgaagattctgaggtcctcttatttgagaggtatgaacttggcttctttcttcgttgcctccaaaatcatcgttttcgttactttcactacctacgtcttgttgggtaacgttattactgcttctagagttttcgttgccgtttcattatatggtgctgttagattgactgtcaccttgtttttcccatctgctgttgaaaaagtttccgaagccttcgtttccatcagaagaatcaagaactttctgttgttggacgaaatcacccaattgcattctcaattgccatctgatggtaagatgatcgttaacgttgaagatttcactgctttctgggacaaagcttctgatactccaactttacaaggtttgtctttcactgttagaccaggtgaattattggcagttgttggtccagttggtgctggtaaatcttctttgttgtctgctgttttaggtgagttgccaccatctcaaggtcaagtttctgttcacggtagaattgcttacgtttctcaacaaccatgggttttctctggtacagtgagatccaatattttgttcggtaagaagtacgagaaagagaggtacgaaaaggttattaaggcttgcgctttgaaaaaggacttgcagttattggaagatggcgacttgactatgattggtgatagaggtactactttgtctggtggtcaaaaggctagagttaatttggctagagctgtttatcaagatgccgacatctatttgttggatgatccattgtcagctgttgatgctgaagtttctagacacttgttcgaattgtgtatttgtcaagccttgcacgaaaagatcagaattttggttacccaccaactgcaatacttgaaagctgcttcccaaatcttgatcttgaaagacggtaaaatggttcaaaagggtacttacaccgagttcttgaagtctggtattgatttcggttccctgttgaagaaagagaacgaagaagctgaaccatctccagttccaggtactccaacattaagaaatagaaccttctccgaatcctccgtttggtcacaacaatcttctagaccatcattgaaagaagctactccagaaggtccagataccgaaaacattcaagttactttgaccgaagaaaccaggtctgaaggtaaggttggttttaaagcttacaagaactacttcactgctggtgctcattggttcatcatcatctttttgatcttggttaacttggctgctcaagttgcttatgtattgcaagactggtggttgtcttattgggctaatcaacaatctgctttgaacgttactgttaacggtcaaggtaatgtcaccgaaaagttgaatttgaactggtacttgggtatctactctggtttgacagcttctactgttttgtttggtattgccagatccttgttggttttcttcgtcttggtttcctcttctcaaaccttgcacaatcagatgttcgaatctattttgagagccccagttttgttcttcgatagaaatccaattggccgtatcctgaacagattctctaaagatattggtcacatggacgacttgttgcctttgactttcttggatttcatccagacattcttgcaagttatcggtgttgttggtgttgcagttgctgttattccatggattgctattccattggttcctttgggtatcgtgtttttcgtattgagaaggtacttcttggaaacctccagagatgttaagagattggaatctactactaggtccccagtgttttctcatttgtcatcttcattgcaaggattgtggaccattagagcttacaaagccgaacaaagattccaagagttgtttgattctcaccaagacttgcattctgaagcctggtttttgtttttgactacctctagatggttcgccgttagattggatgctatttgtgctgtttttgttatcgttgtcgctttcggttcattgattttggctaaaactttggatgctggtcaagttggtttggctttgtcttatgctttaaccttgatgggtatgttccaatggtgtgttaggcaatcagctgaagttgaaaacatgatgatctccgttgaaagagttatcgagtacaccgacttggaaaaagaagctccttgggaatctcagaaaagaccattgccatcatggccacatgaaggtgttattatcttcgataacgtcaacttctcctactctttggatggtcctttagtcttgaaacatttgaccgccttgattaagtctagagaaaaggttggtatcgttggtagaactggtgcaggtaagtcatctttaattgctgccttgttcagattgtctgaaccagaaggtaaaatctggatcgataagatcttgactaccgaaattggcttgcacgatttgagaaagaagatgtccattattccacaagagccagtgttgtttacaggtactatgaggaaaaacttggacccattctctgaacactccgatgaagaattatggaacgctttggaagaagtgcaattgaaagaggccatagaagatttgcctggcaaaatggatactgaattagctgaatctggctccaatttctctgttggtcaaagacaattggtttgtttggccagagctatcttgaggaagaacaggattttgattattgatgaagctaccgccaacgttgatccaagaactgatgaattgatccaaaagaagatcagggaaaagttcgctcattgcactgttttgactattgcccatagattgaacaccatcatcgattccgacaagatcatggttttggattccggtaggttgaaagaatacgatgaaccatatgtcttgttgcagaacagagactctttgttctacaagatggtacagcaattaggtaaagctgaagctgccgctttgactgaaactgcaaaacaagtttacttcaagaggaactacccagatattacccataacggtcatgttgttatgaatgcctcttctggtcaaccatctgccttgactatttttgaaactgccttgtaa

SEQ ID NO: 946 - protein, 1325 aa, Ovis aries
MQPVYPEVKPNPLRNANLCSRVFFWWLNPLFKIGHKRRLEEDDMYSVLPEDRSQHLGEELQGYWDQEVLKAEKDAREPSLTKAIIKCYWKSYVVLGIFTLIEESTRVVQPIILGKIIGYFENYDPSDSAALYEAHGYAGVLSACTLVLAILHHLYFYHVQCAGMRLRVAMCHMIYRKALRLSNSAMGKTTTGQIVNLLSNDVNKFDQVTIFLHFLWAGPLQAIVVTALLWMEIGISCLAGMAVLIILLPLQSCIGKLFSSLRSKTAAFTDTRIRTMNEVITGIRIIKMYAWEKSFADLITNLRRKEISKILRSSYLRGMNLASFFVASKIIVFVTFTTYVLLGNVITASRVFVAVSLYGAVRLTVTLFFPSAVEKVSEAFVSIRRIKNFLLLDEITQLHSQLPSDGKMIVNVEDFTAFWDKASDTPTLQGLSFTVRPGELLAVVGPVGAGKSSLLSAVLGELPPSQGQVSVHGRIAYVSQQPWVFSGTVRSNILFGKKYEKERYEKVIKACALKKDLQLLEDGDLTMIGDRGTTLSGGQKARVNLARAVYQDADIYLLDDPLSAVDAEVSRHLFELCICQALHEKIRILVTHQLQYLKAASQILILKDGKMVQKGTYTEFLKSGIDFGSLLKKENEEAEPSPVPGTPTLRNRTFSESSVWSQQSSRPSLKEATPEGPDTENIQVTLTEETRSEGKVGFKAYKNYFTAGAHWFIIIFLILVNLAAQVAYVLQDWWLSYWANQQSALNVTVNGQGNVTEKLNLNWYLGIYSGLTASTVLFGIARSLLVFFVLVSSSQTLHNQMFESILRAPVLFFDRNPIGRILNRFSKDIGHMDDLLPLTFLDFIQTFLQVIGVVGVAVAVIPWIAIPLVPLGIVFFVLRRYFLETSRDVKRLESTTRSPVFSHLSSSLQGLWTIRAYKAEQRFQELFDSHQDLHSEAWFLFLTTSRWFAVRLDAICAVFVIVVAFGSLILAKTLDAGQVGLALSYALTLMGMFQWCVRQSAEVENMMISVERVIEYTDLEKEAPWESQKRPLPSWPHEGVIIFDNVNFSYSLDGPLVLKHLTALIKSREKVGIVGRTGAGKSSLIAALFRLSEPEGKIWIDKILTTEIGLHDLRKKMSIIPQEPVLFTGTMRKNLDPFSEHSDEELWNALEEVQLKEAIEDLPGKMDTELAESGSNFSVGQRQLVCLARAILRKNRILIIDEATANVDPRTDELIQKKIREKFAHCTVLTIAHRLNTIIDSDKIMVLDSGRLKEYDEPYVLLQNRDSLFYKMVQQLGKAEAAALTETAKQVYFKRNYPDITHNGHVVMNASSGQPSALTIFETAL

SEQ ID NO: 947 - DNA, 2148 bp, Mus musculus
  source 1..2148: mol_type = other DNA
atggacacctcctctaaagaaaacgctcatttgttccataagaactctgctcaacctgctggtggtccatcttttactgttggttatccatctactgaagaggctagaccatgttgtggtaaattgaaagttttcttgggtgccttgtccttcgtttactttgctaaagctttggctgaaggctacttgaagtctactgttactcaaatcgaaaggcgtttcgaaatcccatcttctttggttggtattatcgacggttctttcgagattggtaacttgttggtcattaccttcgtttcttacttcggtgctaaattgcataggccaaagattattggtgctggttgtttggttatgggtttcggtactatgttgattgctgttccacaattcttcatggaaaagtactcctacgaaaagtacgaaaggtactctccatcttctaacgttaccccatctatttcaccttgctacttggaatcttcttctccatctccatcatctattttgggcaagtcccaaaacaagatctctcatgaatgtgttggtgactcctcttcttctatgtgggtttatgtctttctgggcaatttgttgagaggtttgggtgaaactccaattcaaccattgggtattgcttacttggatgatttcgcttctgaagataatgccgctttctacattggttgtgttcaaaccgttgctattatcggtccaattttcggtttcttgttgggttctttgtgtgccaagttgtacgttgatattggtttcgttaacttggaccacattactatcactccaaaagatccacaatgggttggtgcttggtggctaggttacttaattgctggtttcttatctttgttggctgccgttccattttggtgtttgccaaaaactttgccaagatctcagtccagagaaaactctggttctacttctgaaaagtccaagttcattgatgacccaatccattatcaaatggctccaggtgatgataagatgaagattatggaaatggccaaggacttcctgccatctttgaaaactttgtttagaaaccccgtctacatcttgtacttgtgtgcttctactgtgcagttcaattctttgttcggtatggttacttacaagcccaagtacatcgaacaacaatacggtcaatcatcctctaaggccaatttcgttattggcttgattaacattccagctgttgccttgggtatttttagtggtggtatagtcatgaagaagttcagattgggtatctgtgaagccactaagttgtatttgggttcctctgtttttggctacctgttgtttttgtctttgtttgctttgggttgcgagaactcttctgttgcaggtttgactgtttcttaccaaggtacaaaaccagtctcttatcacgaaagagctttgttctctgattgcaactctagatgtaagtgctctgattctaaatgggaacctatgtgtggtgataacggtatcacttatgtttctgcttgtttggctggttgccaatcatcttctagatctggtaagaacatcatcttcagcaactgtacctgtgttggttttgctgctccaaaatctggtaattggtctggtatgatgggtagatgtcaaaaggataacggttgctctcaaatgttcctgtacttcttggttatctctgtcatcacttcttacaccttgtctttaggtggtattccaggctacattttgttgttgagatgtatccaaccacagttgaagtctttcgctttaggtatctataccttggccgttagagttttggcaggtattcctgctccagtttatttcggtgttttgattgatacctcttgcttgaagtggggttttaagaaatgtggttctagaggttcttgcaggttgtatgattctcatgctttcagacatatctacttgggtttgactactttgttgggtactgtctctgttttcttgtctatggctgttttgttcgtcctgaagaagaagtacgtttctaagcactcttcattgattaccaccagggaaaagattggcatgtcctctagtattaagaaagaaacctgtgctgctagagacagaggtttacaacctaaatattggccaggtaaagaaacccgtttgtga

SEQ ID NO: 948 - protein, 715 aa, Mus musculus
MDTSSKENAHLFHKNSAQPAGGPSFTVGYPSTEEARPCCGKLKVFLGALSFVYFAKALAEGYLKSTVTQIERRFEIPSSLVGIIDGSFEIGNLLVITFVSYFGAKLHRPKIIGAGCLVMGFGTMLIAVPQFFMEKYSYEKYERYSPSSNVTPSISPCYLESSSPSPSSILGKSQNKISHECVGDSSSSMWVYVFLGNLLRGLGETPIQPLGIAYLDDFASEDNAAFYIGCVQTVAIIGPIFGFLLGSLCAKLYVDIGFVNLDHITITPKDPQWVGAWWLGYLIAGFLSLLAAVPFWCLPKTLPRSQSRENSGSTSEKSKFIDDPIHYQMAPGDDKMKIMEMAKDFLPSLKTLFRNPVYILYLCASTVQFNSLFGMVTYKPKYIEQQYGQSSSKANFVIGLINIPAVALGIFSGGIVMKKFRLGICEATKLYLGSSVFGYLLFLSLFALGCENSSVAGLTVSYQGTKPVSYHERALFSDCNSRCKCSDSKWEPMCGDNGITYVSACLAGCQSSSRSGKNIIFSNCTCVGFAAPKSGNWSGMMGRCQKDNGCSQMFLYFLVISVITSYTLSLGGIPGYILLLRCIQPQLKSFALGIYTLAVRVLAGIPAPVYFGVLIDTSCLKWGFKKCGSRGSCRLYDSHAFRHIYLGLTTLLGTVSVFLSMAVLFVLKKKYVSKHSSLITTREKIGMSSSIKKETCAARDRGLQPKYWPGKETRL

SEQ ID NO: 949 - DNA, 2076 bp, Homo sapiens
  source 1..2076: mol_type = other DNA
atggaccaaaaccagcacttgaacaaaactgctgaagctcaaccatccgaaaacaaaaagactagatactgcaacggcctgaagatgtttttggctgctttgtccttgtctttcattgctaaaactttgggtgccatcatcatgaagtcctccattattcatatcgagagaaggttcgagatctcctcttctttggttggttttatcgatggttccttcgaaatcggtaacttgttggttatcgtgttcgtttcttacttcggttccaaattgcataggccaaagttgattggtattggttgcttcattatgggtatcggtggtgttttgactgctttaccacatttctttatgggctactacaggtactccaaagagactaatatcgactcctctgaaaactctacttctaccttgtctacctgcttgattaaccagatcttgtctttgaatagagcctctccagaaatcgttggtaagggttgtttgaaagaatccggttcttatatgtggatctacgtgtttatgggtaacatgttgagaggtattggtgaaactccaatagttccattgggtttgtcctacattgatgactttgctaaagaaggccactcctcattatacttgggtattttgaatgccattgccatgatcggtccaattattggttttaccttgggctctttgttctccaagatgtacgttgatattggttacgtcgatttgtccaccattagaattactccaactgattctagatgggttggtgcttggtggttgaatttcttggtttctggtttgttcagcatcatctcctctattcctttcttcttcttgccacaaactccaaacaagccacaaaaagaaagaaaggcctctttgtcattgcacgtcttggaaactaatgacgaaaaggatcaaactgccaacttgaccaatcaaggtaagaacattactaagaacgtcaccggtttcttccagtcctttaagtctattttgactaaccccttgtacgtcatgttcgttttgttgactttgttgcaggtcagctcttacattggtgcttttacttacgttttcaagtacgtcgaacaacaatacggtcaaccatcttctaaggccaatattttgttgggtgttatcacgattccaatcttcgcttctggtatgtttttaggtggttacattatcaagaagttcaagttgaacaccgttggtattgctaagttctcttgtttcactgccgttatgtcactgtctttctacttgttgtacttcttcatcttgtgcgagaacaaatctgttgctggtttgactatgacttacgatggtaacaatccagttacctctcatagagatgttccattgtcttactgtaactccgattgcaactgtgatgaatctcaatgggaaccagtttgtggtaacaacggtattacttacatttctccatgtttggccggttgcaaatcttcttcaggtaacaaaaagcccatcgtgttctacaactgttcttgcttggaagttaccggtctgcaaaacagaaattactctgctcatttgggtgaatgcccaagagatgacgcttgtactagaaagttttacttcttcgtcgccatccaagtcttgaacttgtttttctcagcactaggtggtacttcccatgttatgttgattgtcaaaatcgtccagccagagttgaaatctttggctttgggttttcactccatggttattagagccttaggtggtattttggctccaatctattttggtgccttgattgataccacctgtattaagtggtctaccaacaactgtggtactagaggttcttgtagaacctacaattctacctcattctccagagtctacttgggtttatcttctatgttgagggtttcctctttggtcttgtacatcattttgatctacgccatgaagaaaaagtaccaagagaaggatattaacgcctccgaaaatggttctgttatggatgaagctaacttggagtctctgaacaagaacaaacatttcgttccatctgctggtgctgattctgaaactcactgttaa

SEQ ID NO: 950 - protein, 691 aa, Homo sapiens
MDQNQHLNKTAEAQPSENKKTRYCNGLKMFLAALSLSFIAKTLGAIIMKSSIIHIERRFEISSSLVGFIDGSFEIGNLLVIVFVSYFGSKLHRPKLIGIGCFIMGIGGVLTALPHFFMGYYRYSKETNIDSSENSTSTLSTCLINQILSLNRASPEIVGKGCLKESGSYMWIYVFMGNMLRGIGETPIVPLGLSYIDDFAKEGHSSLYLGILNAIAMIGPIIGFTLGSLFSKMYVDIGYVDLSTIRITPTDSRWVGAWWLNFLVSGLFSIISSIPFFFLPQTPNKPQKERKASLSLHVLETNDEKDQTANLTNQGKNITKNVTGFFQSFKSILTNPLYVMFVLLTLLQVSSYIGAFTYVFKYVEQQYGQPSSKANILLGVITIPIFASGMFLGGYIIKKFKLNTVGIAKFSCFTAVMSLSFYLLYFFILCENKSVAGLTMTYDGNNPVTSHRDVPLSYCNSDCNCDESQWEPVCGNNGITYISPCLAGCKSSSGNKKPIVFYNCSCLEVTGLQNRNYSAHLGECPRDDACTRKFYFFVAIQVLNLFFSALGGTSHVMLIVKIVQPELKSLALGFHSMVIRALGGILAPIYFGALIDTTCIKWSTNNCGTRGSCRTYNSTSFSRVYLGLSSMLRVSSLVLYIILIYAMKKKYQEKDINASENGSVMDEANLESLNKNKHFVPSAGADSETHC

SEQ ID NO: 951 - DNA, 4638 bp, Homo sapiens
  source 1..4638: mol_type = other DNA
atgttggagaagttctgcaactctaccttctggaattcttcattcttggattcacctgaagctgatttgccattgtgtttcgaacaaactgttttggtttggatcccattgggtttcttgtggttgttggctccatggcaattattgcatgtttacaagtccaggaccaagagatcttctactactaagttgtacttggctaagcaagttttcgttggcttcttgttgattttggctgctattgaattggccttggttttgactgaagattctggtcaagctactgttccagctgttagatatacaaacccatccttgtacttaggcacctggttgttagttttgttgatccaatattccagacaatggtgcgtccaaaagaactcttggtttttgtctttgttctggatcctgtctattttgtgcggtactttccaattccaaaccttgattagaaccttgttgcaaggtgacaattccaacttggcttactcttgcttgttcttcatttcctacggtttccagatcctgatcttgattttctctgctttctccgagaacaacgagtcatctaacaatccatcttccattgcctcattcttgtcctctattacctattcctggtacgactccattatcttgaagggttacaaaagaccattgaccttggaagatgtttgggaagttgatgaagagatgaagactaagaccctggtttctaagttcgaaacccatatgaagagagaattgcaaaaagctagaagggcattgcaaagaaggcaagaaaaatcctctcagcaaaattctggtgctagattgccaggtttgaacaagaatcaatcccaatctcaagatgccctggttttagaagatgtcgaaaagaaaaagaagaagtccggtactaagaaggatgttccaaaatcctggttaatgaaggctttgttcaagaccttctacatggtcttgttgaagtccttcctgttgaaattggtcaacgatatcttcacctttgtctctccacaactgttgaagttgttgatctctttcgcttctgatagagatacctacttgtggattggttacttgtgcgctattttgttgtttaccgctgccttgattcaatccttttgcttgcaatgttacttccagttgtgtttcaagttgggtgttaaggttagaaccgctattatggcttccgtttacaaaaaggctttgaccttgtctaacttggccagaaaagagtatacagttggcgaaactgttaacttgatgtccgttgatgctcaaaagttgatggatgttaccaacttcatgcacatgttgtggtcctctgttttacaaatcgtcctgtcgatattcttcttgtggcgtgaattgggtccatcagttttggctggtgttggtgttatggttttggttattccaatcaacgccatcttgtctactaagtccaaaactatccaagtcaagaacatgaagaacaaagataagaggctgaagatcatgaacgagatcttgtctggtatcaagatcttaaagtacttcgcttgggaaccatccttcagagatcaagttcaaaacctgaggaagaaagagctgaaaaacttgttggctttctcccaattgcaatgcgttgttatcttcgttttccaattgaccccagtcttggtttctgttgttactttctctgtttacgtcttggtcgactccaacaacattttggatgcacaaaaagctttcacgtccatcaccttgttcaatattttgaggttccccttgtctatgctgccaatgatgatttcttctatgttgcaagcttctgtctccactgaaagactggaaaagtacttaggtggtgatgatttggatacctccgctattagacatgattgcaatttcgataaggccatgcaattttccgaagcttcttttacttgggaacatgattctgaagctaccgttagagatgtcaacttggatattatggccggtcaattagttgctgttattggtccagttggttccggtaaatcttctttgatttcagctatgttgggcgagatggaaaatgttcatggtcatattaccatcaagggtactactgcttatgtcccacaacaatcctggattcaaaacggtactatcaaggacaatatcttgttcggtactgagttcaacgaaaagagataccaacaagtcttggaagcttgtgctttgttgccagatttggaaatgttgcctggtggtgacttggcagaaattggtgaaaaaggtatcaatttgtccggtggtcaaaagcaaagaatctctttggctagagctacctaccaaaatttggacatctacttgttggatgatccattgtcagctgttgatgcccatgttggtaaacacatctttaacaaagttttgggtccaaacggtttgttgaaaggtaaaactaggttgttggttacccactccatgcatttcttgccacaagttgacgaaatcgttgttttaggtaacggtacaatcgtcgaaaagggttcttattctgctttattggctaagaagggtgaattcgccaagaacttgaaaaccttcttgagacatactggtccagaagaagaggctacagttcacgatggttctgaagaggaagatgacgattacggtttgatctcatccgttgaagaaataccagaagatgctgcttctatcaccatgagaagagaaaactcattcagaaggaccctgtctagatcctctagatctaatggtagacacttgaagtctctgaggaactctttgaaaaccagaaacgtcaactccttgaaagaggatgaagagttggttaagggtcagaagttaatcaagaaagagttcatcgaaaccggcaaggttaagttctctatctacttggaatacttgcaagccatcggtttgttctccatctttttcattattctggccttcgtcatgaactccgttgctttcattggttctaacttgtggttatctgcttggacctctgattccaagattttcaactctactgattacccagcctctcaaagggatatgagagttggtgtttacggtgctttgggtttagctcaaggtattttcgttttcattgcccatttttggtctgcctttggttttgttcatgcctctaatatcttgcacaagcagttgttgaacaacatattgagagcaccaatgaggttctttgatacaactccaactggtagaatcgtcaatagattcgctggtgatatttccactgttgatgatactttgccacagtctttgagatcttggatcacttgtttcttgggtatcatctctaccttggttatgatctgtatggctactccagttttcaccattatcgttattccattgggcatcatctacgtgtctgttcaaatgttctacgtttccacctctagacagttgagaagattggattctgttaccagatctccaatctactcccatttctctgaaactgtatctggtttgccagttattagagccttcgaacatcaacagagattcctaaagcacaacgaagttagaatcgataccaatcagaagtgcgtcttttcctggattacttctaatagatggttggccatcagattggagttggttggtaatttgactgttttcttctccgctttgatgatggttatctacagagatactttgtctggtgataccgttggtttcgttttgtctaacgctttgaacatcacccaaactttgaactggttggttagaatgacctccgaaatcgaaactaacatcgttgccgttgaaagaattactgagtacaccaaggttgaaaatgaagctccatgggttactgacaaaaggccaccaccagattggccatctaaaggtaagattcagtttaacaactaccaggtcagatacagaccagaattggatttggttttaaggggtattacctgcgatattggctctatggaaaagataggtgttgttggtagaactggtgctggtaaatctagtttgactaactgtttgttcagaatcttagaagctgctggtggtcagattattatcgatggtgttgatattgcctccatcggtctacatgatttgagagaaaagttgaccatcattccacaagacccaattttgttctctggctctttgagaatgaacttggatcccttcaacaattactccgacgaagaaatttggaaggctttagaattggcccacttgaaatcttttgtcgcttctttacaattgggcttgtcacatgaaggtactgaagctggtggtaacttatctattggtcaaagacagttgttgtgcttgggtagagctttgttgagaaagtctaagattttggtcttggacgaagctactgctgctgttgatctagaaaccgataatttgattcaaaccaccatccaaaacgaattcgctcattgcactgttatcaccattgctcatagattgcataccatcatggattccgataaggttatggtgttggataacggtaagattatcgaatgtggttctccagaagagttgttgcaaattccaggtccattttacttcatggctaaagaagctggtatcgagaacgttaattctaccaagttctaa

SEQ ID NO: 952 - protein, 1545 aa, Homo sapiens [sequence omitted]

SEQ ID NO: 953 - DNA, 4587 bp, Homo sapiens
  source 1..4587: mol_type = other DNA
atggatgctttgtgtggttctggtgaattgggttctaaattctgggattccaacttgtctgttcacactgaaaatccagatttgaccccatgcttccagaattctttgttggcttgggttccatgtatctatttgtgggttgctttgccatgttacttgttgtatttgagacatcactgcaggggttacatcatcttgtctcatttgtctaagctgaagatggttttgggtgttttgttgtggtgtgtttcttgggctgatttgttctactctttccatggtttggttcatggtagagcaccagctccagttttctttgttactccattggttgttggtgtcactatgttgttggctaccttgttgattcagtacgaaagattgcaaggtgtccaatcttctggtgttttgatcattttctggttcttgtgtgttgtttgcgctatcgttccattcagatccaagattttgttggcaaaagccgaaggtgaaatctctgatccttttagattcaccaccttctacattcatttcgccttggttttgtccgctttgattttggcttgtttcagagaaaagccaccattcttctctgccaaaaacgttgatccaaatccatatccagaaacctctgctggtttcttgtctagattattcttttggtggttcaccaagatggctatctatggttatagacacccattggaagaaaaggacttgtggtctttgaaagaagaggacagatctcaaatggttgtccaacaattattggaagcttggaggaagcaagaaaagcaaactgctagacataaggcttcagctgctccaggtaaaaatgcttcaggtgaagatgaagttttgttaggtgctagaccaagaccaagaaagccatcatttttgaaggctttgttagcaaccttcggcagctctttcttgatttctgcttgcttcaagttgatccaggacttgttgtcctttattaacccacagttgctgtccatcttgatcagattcatttctaatccaatggctccatcatggtggggtttcttggttgctggtttggatgttccagttgctccttggatgcaatccttgattttacaacattactaccactacatcttcgtcaccggtgttaagtttagaacaggtattatgggtgtcatctacagaaaggctttggttattaccaactccgttaagagggcttctactgttggtgaaatcgttaacttgatgtccgttgatgctcaaagattcatggacttggctccattcttgaacttgttatggtctgctccattgcaaattatcctggccatatactttttgtggcagaatttgggtccatctgttttggctggtgttgcttttatggttttgttgatcccattgaatggtgctgttgctgttaagatgagagctttccaagttaagcagatgaagctgaaggattccaggattaagttgatgtctgaaatcttgaacggcatcaaggtcttgaaattatacgcttgggaacccagctttttgaaacaagttgaaggtatcagacagggtgaattgcaactattgagaactgctgcttacttgcataccactactacttttacttggatgtgctccccattcttggttactttgattacattgtgggtttacgtttacgtcgatccaaacaatgttttggatgctgaaaaggccttcgtttctgtctctttgttcaacattttgaggctgccattgaacatgttgccacaattgatttctaacttgacccaagcctctgtgtccttgaaaagaattcaacagtttctgtcccaagaagaattggatccacaatccgttgaaagaaagactatttctccaggttacgccattaccattcattctggtacttttacatgggcccaagatttgccaccaactttacattctttggacattcaagttccaaagggtgctttagttgctgttgttggtccagttggttgtggtaaatcttctttggtttctgctttgttgggtgagatggaaaaattggaaggtaaggttcacatgaagggttctgttgcttatgttccacaacaagcttggattcaaaactgtaccttgcaagaaaatgtcttgttcggtaaagctttgaacccaaagagataccaacaaactttagaagcttgtgccttgttggcagatttggaaatgttgccaggtggtgatcaaactgaaattggtgaaaagggtatcaacttgtcaggtggtcaaagacaaagagtttctttggctagagctgtttattccgatgccgatattttcttgttggatgatccattgtctgccgttgattctcatgttgctaagcacattttcgatcatgttattggtcctgaaggtgttttggcaggtaaaactagagttttggttacccacggtatttctttcttgcctcaaaccgatttcattatcgttttggccgatggtcaagtttctgaaatgggtccatatcctgctctgttgcaaagaaatggttctttcgctaacttcttgtgtaactacgctccagatgaagatcaaggtcatttggaagattcttggacagctttggaaggtgctgaggacaaagaagctttgttgattgaagataccttgtccaaccataccgatttgactgataatgatccagttacctacgttgtccaaaagcaattcatgagacagttgtcagctttgtcatctgatggtgaaggtcaaggtagaccagttccaagaaggcacttaggtccatcagaaaaagttcaagttactgaagctaaagctgatggtgctttgactcaagaagaaaaagctgctattggtactgtcgagttgtctgtcttttgggattatgctaaagcagttggtttgtgtactaccttggctatttgtttgttgtacgttggtcaatctgctgctgcaattggtgctaatgtttggttgtctgcatggactaatgatgctatggctgattctagacaaaacaacacctctttgagattaggtgtttatgctgctttgggtatcctacaaggtttcttagttatgttggctgctatggcaatggctgctggtggtattcaagctgcaagagttttacatcaagccctgttgcataacaagatcagatcaccacaatctttcttcgatacaactccatccggtagaattttgaactgcttctctaaggatatctacgtcgttgatgaagtattggccccagttattttgatgctgttgaactcctttttcaacgccatttctaccttggttgttatcatggcttctacccctttgttcaccgttgttattttgccattggctgtcttgtacactttggtccaaagattttacgctgctacctctagacaattgaagagattggaatccgtttccagatctccaatctactcccatttttctgaaactgttactggtgcctctgttattagagcttacaacagatctagagacttcgagattatctccgataccaaggttgatgccaatcaaagaagttgctacccctacattatttccaacagatggttgtctattggtgtcgaattcgttggtaattgcgttgttttatttgctgccttgtttgccgttatcggtagatcttcattgaacccaggtttggttggtttgagtgtttcttactcattgcaagttaccttcgctttgaactggatgatcagaatgatgtccgatttggaatctaacatcgttgcagtcgaaagggtcaaagaatactctaagactgaaactgaagctccatgggttgtcgaaggttctagacctccagaaggttggccaccaagaggtgaagttgaattcagaaattactccgtcagatacagaccaggtttagatttggttttgagggatttgtccttgcatgttcatggtggtgaaaaagttggtatcgttggtagaactggtgctggtaaatcatctatgactttgtgcttgttcagaatcttggaagctgctaagggtgaaattagaatcgatggtttgaacgttgctgatatcggtttacatgacttgagatcccaattgaccatcattccacaagatccaattttgttctccggtactttgagaatgaacttggatccttttggttcctactccgaagaggatatttggtgggctttagaattgtctcacttgcacactttcgtttcttcacaaccagcaggtttggacttccaatgttctgaaggtggcgaaaatttgtctgttggtcagagacaattggtttgcttagctagagctttgctgagaaagtccagaatattggttttagatgaagccactgccgccattgacttggaaactgataatttgattcaggccactatcagaactcaattcgatacttgtaccgtcttgaccattgctcatagattgaacaccattatggattacacccgtgttctggttttggataagggtgttgttgctgaattcgattctccagcaaatttgattgctgccagaggtattttctatggtatggctagagatgctggtctggcttaa

SEQ ID NO: 954 - protein, 1528 aa, Homo sapiens [sequence omitted]

SEQ ID NO: 955 - DNA, 4452 bp, Candida oxycetoniae
  source 1..4452: mol_type = other DNA
atgggctcctcattggaagatcaaaagatcttgcatagacagaagaggttgttgtctccattcttgtctaaaaaggttccacatgttccaaccgaagatgaacgtagaccatatccagcttctaaggctaacgttatctccagaattttcttctggtggttgtccccagttatgaaaactggttacaaaagaaccttgcaaccagaggatttgttctacttgaccgatgatattaaggttcaaaccatggccgattccttctacttgtatatgactcacgatatcgatagagccaagcagaagttcttgatcaaaaagtgcaaagaaaggggtgaaaccttggaaacttcttccgttgatagagaagttgacttgaaggacttccagttgtctaagttcattaccgtttgggctttagctaagactttcaagtggcaatattcttgggcttgtttctgtttggctttgtctaatgttggtcaaactaccatgcctttgctgaccaaaaagttgatccaatacgttgaattgaaggccttgggtgacgaaactggtattggtaaaggtttgggttactcttttggtactgctgctatcgtttttatcgttggcgttttgattaaccacttcttctacagatctatgttgactggtgctcaagctaaagctgttttgacaaaagctttgctggacaagtctttcaagttgtcctctgaagctaaacataagtacccaccaggtaagattacttccatgttgggtactgatttgtccagaattgatttcgctttgggtttccaaccattcttgatcgttttcccaattccaattggtatcgccattgccattttgattgtcaatatcggtgtttcctctttggttggtgttgctattttgttcgttttcatgatcggtattgctttctctactggtgctttgttggcttacagaaagaaggctaatttcttcaccgataccagagtcaactacatcaaagaagctctgaacaacctgaaggtcatcaagttttactcttgggaaccaccataccacgaaaacatttccaacgtcagaaagaaagagatgaggatcatctacagaatgcagatcttgagaaatatcgttacctccttcgctatgtctttgactttgtttgcttctatgactgccttcttggtcttgtacgctattgctaatggtagaagagatccagcctctatcttttcctcattgtctttgttcaacactttgacccaacaggttttcttgttgccaatggctttggctacaggtgctgatgcttttatgggtatttctagagttggtgagttcatgtcccaaaacgaagttcatcctgaagaaaacagaattgaagctccacctgaagtccaaaaagaaatggacagagaaggtttggccatcgaagttaatcatgctgattttgagtgggaagtgttcgaagatgacgaagaagaagaggaagctggtaaagaaaaagagaaagaaaaagaaaagaagaaagagaaagagaacggtttcgaagctggtttcgaaaacaaaaagaaaatgaacaagatgtccaagaaaaagcgtgaaaagaaagaaactaagaaggccgaatccttcgaaaacgaaaccattcatgattcccataccgaaaagttgtctaccaaggattctgattttaccgctgatacctctagtgaagaggaattggttttcgacggtttgaagaacatcaacttcaacatcaagaagggtgaattcgttgttatcaccggtttgattggttccggtaaatcttctttgttagctgctatgtctggtttcatgaagagattgagaggttctgttaatgtcaacggctctttgttgttgtgtggtcaaccatgggttcaaaacaacactgttaaggacaacattatcttcggctccaaatacgacgaagaaaagtacaagagagtgatctactcttgctccttggaatccgatttggaaattttgccagctggtgatagaaccgaaattggtgaaagaggtattactttgtctggtggtcaaaaggctagaatcaatttggctagagctgtttatgccgataaggacatcattttgttggatgatgttttgtccgctgttgatgcaagagttggtattcatattatgaacaactgcatcctggacctgcttaaagagaaaactagaatcttggctacccatcagttgtctttaattggttctgccgatcgtatcatcttcttgaatggtgatggtagtgttgatgtcggtactttcgaagaattgaaagaagctaacccaggtttcggtaacttaatgacttacaaccacgaacacgagaaagaggaagaagtcgatatagaacagttgtccgaagaagagttggaagaagagaagaagttgatcgaaagacaattgactcagagaactaccagaaccacaagatctattggtcctgaaaatgaggaagaggacgacgacgaagaggctagacatcatgaattcaatttggacgaaacagccgatggtactttgataggttctgaagaaagggctgttaatgctattggttgggatgtttacgctaggtacattagattaggttcaggtagattcactccctggttgattttgcctgctttattgactgctatgctgttgtctactttctcccaaattttcactaacacctggttgtcattttggacctcttacaagtttaacaggcccaacaaattctacatcggcatctacattatgttcacgttcttgtcgttctttctgctgaccatcgaattcatcatcttggtctatattaccaacaccgcctctgttatgttgaatgttatggctgttaagagagttttacacgccccaatgtcttttatggatacaactccaatgggcagaatcttgaacagattcactaaggataccgatgtcttggataacgaaatcggtgatcaaatgcgtttcttcttgttcaccttctgcaacatcattggtgtcttgattttgtgcatcatctacttgccatggttcgctattgcaattccatttttgggtgtcgtctttgtttccattgctaactattatcaagcctccgcaagagaagttaagagattggaagctgttcaaaggtccttggtttacaacaatttcaacgaaaccttgtctggtatgccaaccattaaggcttataatgctacctctagattcatggacaagaacaatttcttgattgacaagatgaatgaggcctactacatcactatcgctaatcaaagatggttggccattcacatggatttcattgcatctttgttcgccttgttgattgccttgttatgtgtcaacagggtgttcaatattggtgcttcttcagttggtctgatcgtgtcttacgtttttcaaattgctggccagttgtccatgttgattagaacttttacccaagtcgagaacgaaatgaactccgctgaaagattatcttcttacgctacttctttgcctgaagaggctccatatgttattactgaaagaactccaccaccagattggccatctaaaggtggtattatctttgatcatgcttccttggcttatagaccaggtttgccattggttttaaaggacttgactttcagagttgagcccatggaaaagattggtatttgtggtagaactggtgctggtaagtcatctattatgacagccttgtacaggttgtctgaattggaatctggtaagatcgaaatcgatgacattgacatttctaccttgggtttgagagacttgagatccaaattgtccatcattcctcaagatccagtcttgtttagaggcaccattagaaagaacttggatccatttggtgaacactccgatgataagttgtgggatgctttgagaagaactggtttgatcgaagaatccagattagaagccgtcaaaaagcagaccaaagtttcttctgctactactacaacagctgccaattctgaaaaaggtgatgctactgctactgccactacaactactccattgaacaagttccatttggaccaaaccgttgaagatgaaggttctaatttcagcttgggtgaaagacagttgattgcttttgctagagctttggttagagactcgaaaatcttgatcttggatgaagccacatcctccgttgattacgaaactgatttcaaggttcaacagaccatcgttagagaatttggtgattgcaccattttgtgtatcgcccatagattgaaaaccatcatcaactacgacaggatcttggttttggataagggtgaaatcaaagaattcgacaccccactgaacctgtttaatttggaaggtggcattttccaacaaatgtgccaaagatctaacatcacccaagaggatttctctaacaccaagaatttctaa

SEQ ID NO: 956 - protein, 1483 aa, Candida oxycetoniae
MGSSLEDQKILHRQKRLLSPFLSKKVPHVPTEDERRPYPASKANVISRIFFWWLSPVMKTGYKRTLQPEDLFYLTDDIKVQTMADSFYLYMTHDIDRAKQKFLIKKCKERGETLETSSVDREVDLKDFQLSKFITVWALAKTFKWQYSWACFCLALSNVGQTTMPLLTKKLIQYVELKALGDETGIGKGLGYSFGTAAIVFIVGVLINHFFYRSMLTGAQAKAVLTKALLDKSFKLSSEAKHKYPPGKITSMLGTDLSRIDFALGFQPFLIVFPIPIGIAIAILIVNIGVSSLVGVAILFVFMIGIAFSTGALLAYRKKANFFTDTRVNYIKEALNNLKVIKFYSWEPPYHENISNVRKKEMRIIYRMQILRNIVTSFAMSLTLFASMTAFLVLYAIANGRRDPASIFSSLSLFNTLTQQVFLLPMALATGADAFMGISRVGEFMSQNEVHPEENRIEAPPEVQKEMDREGLAIEVNHADFEWEVFEDDEEEEEAGKEKEKEKEKKKEKENGFEAGFENKKKMNKMSKKKREKKETKKAESFENETIHDSHTEKLSTKDSDFTADTSSEEELVFDGLKNINFNIKKGEFVVITGLIGSGKSSLLAAMSGFMKRLRGSVNVNGSLLLCGQPWVQNNTVKDNIIFGSKYDEEKYKRVIYSCSLESDLEILPAGDRTEIGERGITLSGGQKARINLARAVYADKDIILLDDVLSAVDARVGIHIMNNCILDLLKEKTRILATHQLSLIGSADRIIFLNGDGSVDVGTFEELKEANPGFGNLMTYNHEHEKEEEVDIEQLSEEELEEEKKLIERQLTQRTTRTTRSIGPENEEEDDDEEARHHEFNLDETADGTLIGSEERAVNAIGWDVYARYIRLGSGRFTPWLILPALLTAMLLSTFSQIFTNTWLSFWTSYKFNRPNKFYIGIYIMFTFLSFFLLTIEFIILVYITNTASVMLNVMAVKRVLHAPMSFMDTTPMGRILNRFTKDTDVLDNEIGDQMRFFLFTFCNIIGVLILCIIYLPWFAIAIPFLGVVFVSIANYYQASAREVKRLEAVQRSLVYNNFNETLSGMPTIKAYNATSRFMDKNNFLIDKMNEAYYITIANQRWLAIHMDFIASLFALLIALLCVNRVFNIGASSVGLIVSYVFQIAGQLSMLIRTFTQVENEMNSAERLSSYATSLPEEAPYVITERTPPPDWPSKGGIIFDHASLAYRPGLPLVLKDLTFRVEPMEKIGICGRTGAGKSSIMTALYRLSELESGKIEIDDIDISTLGLRDLRSKLSIIPQDPVLFRGTIRKNLDPFGEHSDDKLWDALRRTGLIEESRLEAVKKQTKVSSATTTTAANSEKGDATATATTTTPLNKFHLDQTVEDEGSNFSLGERQLIAFARALVRDSKILILDEATSSVDYETDFKVQQTIVREFGDCTILCIAHRLKTIINYDRILVLDKGEIKEFDTPLNLFNLEGGIFQQMCQRSNITQEDFSNTKNF

SEQ ID NO: 957 - DNA, 4401 bp, Hyphopichia burtonii
  source 1..4401: mol_type = other DNA
atggctgtttacgctagaagaaccccagttattactgttagacaccaaagaatcttcggcttcagatccatttctgttcaattgactgctttggctgttgcctttagatctcaagctcatcaaaaggttgattccaacaccgttatctaccaagcttatagagttccaccattgccatctcaagacgaaagaaatgcttttccagaaaagactgctaacccattgtccagagttttcttttggtggttgaatccagttatgaagaccggttacaaaagaaccttgcaaccagatgatttgttctacttgggtgatgatttcgttgttaagccaaaggccgataagttcatcgaaatcttcaacagaagattggccaaggccaaagaaaaccatatcttgcaaaagtgcaaagagaggaacgaatctatcgattcctcatccgtttccaaagaagaggatatggaagatttttcaccaccaaaggctattaccgctttgtctttgttggaaaccttcaagatcagatacttcatggcttgtttgttgttgaccatctgtaacgttgctcaaactttgaatcccctgttgaccaagaagttgatccaatttgttgaaagacgtgctgctggtgttgaatctagagttggtccaggtgttggttatgctattggtgcttctttgctggttttggttattggtattttcgtcaaccacttcttctacaactctatgatgtgtggtgctttctctaaagctgttttgactaaggctatgctggacaagtcttttaagcaaaatgccgaatccagatctaaatacggtgctggtaaagtcacttctatgatgggtactgatttggccagaattgatttcgctattggtttccagccattcatcattacttttccagttccagtcattatcgctatcgccattttgatcgttaatgttggtccatctgctttggttggtgtaggtttgttactgttcttcgtgtttttcatgatgtggtgcgctaagcaattcttctcatacagagttattgccaacaagttcaccgataagagggtgtcttatatcaaagaggtcctgaacaacctgaagatcatcaagttttattcttgggaaccaccataccacgaaaacatttctgatgtcaggtacaaagagatgaagaacatcttgaagatgcaggtcttgaggaacattttgatggctttggctatgtctatgaccaccttatcttctatggctactttcttgaccttgtacggtgctaaaaatggtaaagatgatgccgcctctatcttctcctcaatttctttgtttaacgtcttgtcccagcaggttttgatgttgccattggctttagcagccggtgttgattgcatgactggtttgataagagtcggtagatatttggcctcctctgaaattgatccagaatccaatagaatcgatgccgactctgaaaagatcgttgaaatggattctaacgacttgtctatcgaagttaacaacgctaacttcgaatgggaaactttcgaattgcaggacgaagaaaacgaagttgacttgatcaacctgaacaagaagtacagaaagcaattggccagagaagagaagcttaagaagaagttgtctcagaactcttctaccgaaaacgacgaaaagttggaagaatctaactaccatgcagacccagaaggtaaagaattgaaggattcttcttccaatgacacctccttggaagattcaaatttcgctggtttgaacaacatcgacttgaagattaagaagggtgaattcgttgtcatcaccggtttgattggttctggtaaatcctctttgttgttagccttgtccggttttatgaagagaacttctggttctgttaacgtcaacggttccttgttgttgtgtggttacccatggattcaaaacgataccgttaagtccaacatcttgttcggtgaagaattggatgaagccaagtactctgaagttgtttacgcatgttcattggaatccgacttggaaattttgccagctggtgatgctactgaaattggtgaaagaggtattactttgtccggtggtcaaaaggctagaatcaatttggctagagctgtctacaacaacaaggacattatcttgttggacgatgttttgtctgctgttgatgcaagagttggtaagcacattatgaacaactgcatcttgggtttgttgaaggataagaccagaattttggctacccaccaattgtctttaatcggttctgctgatagagtcatcttcttgaatggtgatggttcagtttctgttggtgctgtcgaagaattgagggaaaacaatttcgcctttaacaacttgatggccttcaactctgaaactaaggatgaagaagaagagaaagaggaagaaaacgaggacgaggaacaagaagctcaagaattcgaatccatcaagagacagttgtccaagattcccactaacaaagaaaaagatgaagaggccatccacaaggattacaatcaaaacaatactgaggacggcaagttgatggcatctgaagatagggctatcaacggtattaagttggatgtctacaaaaagtacatccactacggttccggtaagattggttcattggttatgtgttttgccatcgttttggcagttgttttggcaactttctgccaattattcactaacacctggttgtcattctggaccgaaaagaaatttccaggtaagtctgatggtttctacatcggtttttacgttatgttcgctgtcttgtctggcctgttgattatgattgagtttatcttcttcgtgctgttgactaacactgcctctaagaacttgaatatcttggccgttaagaaagtcttgcatgctccaatgtctttcatggatacaactccaatgggtagaatcttgaacagattcactaaggataccgatgccttggataatgaattgggtgatcaaatccgtatgctgttcttctttttcggtaatattgccggtgttttgatcttgtgtgttatctacttgccatggttcgcaattgctattccatttttggttgctttgttcatcggtgttgctaattactatcaagcttccgctagagaaatcaagagattggaagctttacaaaggtcccacgtttacaacaactttaacgaaacattgaacggcatgaacaccattaaggcttacaaagctgatcacatctacttgaggaagaacgagtttttcctaaacaagatgaacgaagcctactacttgactattggtaatcaaagatggctggccattcatttggattgcttggctactattttcgccttgattattgccttgttgtgcgtttttagggtgttctctattggtccagcttcagttggtttgttattgtcttacgtcttgcaaattgccggtcagttgtctatgttgattagaacttacacccaggtcgaaaacgaaatgaatgcagttgaaagaatgtgctcctacgcttttgatttgcctcaagaagccccattcaaaatctctgaaacaactccaccaccagaatggcccgaacaaggttctattaagtttgaagatgtttccttggcttacagaccaggtttgccattagttttgaagaacttgtccttgcaagttgagccatcacaaaagattggtatctgtggtagaactggtgcaggtaaatcttctattatgactgccttgtacaggctgtctgaattgtctactggtaagatcgaaatcgatggtatcgacatttcgtctttgggtttgagttctttgaggtccaaattgtccatcattccacaagatccagttttgttccaaggcaccattagaaagaatctggacccttttaatgaacaccctgatgacttgttgtgggattctttgcgtagagctggtttaattgaagaggctaaattgaagtccgtcaagaggcaaaatgatgagtctgaagaataccacaagttccacttgaatcaagaggttgaagatgatggtgctaacttctcattgggtgaaagacagttgattgcttttgctagagctttggttagagactcgaagatcttgattttagacgaagctacttcctccgttgattacgaaactgacaacaagattcaatctaccatcgtcagggaattctctaagtgtaccattttgtgcattgcccacagattgaaaaccatcttgaactacgataagatcctggtcttggataagggtgagatcaaagaatttgataccccatggaatttgttcaacaccgaggattctattttccagcaaatgtgcgaaagatccaacatcacagtcgaagatttccaaaacttgcagaggatgtga

SEQ ID NO: 958 - protein, 1466 aa, Hyphopichia burtonii
MAVYARRTPVITVRHQRIFGFRSISVQLTALAVAFRSQAHQKVDSNTVIYQAYRVPPLPSQDERNAFPEKTANPLSRVFFWWLNPVMKTGYKRTLQPDDLFYLGDDFVVKPKADKFIEIFNRRLAKAKENHILQKCKERNESIDSSSVSKEEDMEDFSPPKAITALSLLETFKIRYFMACLLLTICNVAQTLNPLLTKKLIQFVERRAAGVESRVGPGVGYAIGASLLVLVIGIFVNHFFYNSMMCGAFSKAVLTKAMLDKSFKQNAESRSKYGAGKVTSMMGTDLARIDFAIGFQPFIITFPVPVIIAIAILIVNVGPSALVGVGLLLFFVFFMMWCAKQFFSYRVIANKFTDKRVSYIKEVLNNLKIIKFYSWEPPYHENISDVRYKEMKNILKMQVLRNILMALAMSMTTLSSMATFLTLYGAKNGKDDAASIFSSISLFNVLSQQVLMLPLALAAGVDCMTGLIRVGRYLASSEIDPESNRIDADSEKIVEMDSNDLSIEVNNANFEWETFELQDEENEVDLINLNKKYRKQLAREEKLKKKLSQNSSTENDEKLEESNYHADPEGKELKDSSSNDTSLEDSNFAGLNNIDLKIKKGEFVVITGLIGSGKSSLLLALSGFMKRTSGSVNVNGSLLLCGYPWIQNDTVKSNILFGEELDEAKYSEVVYACSLESDLEILPAGDATEIGERGITLSGGQKARINLARAVYNNKDIILLDDVLSAVDARVGKHIMNNCILGLLKDKTRILATHQLSLIGSADRVIFLNGDGSVSVGAVEELRENNFAFNNLMAFNSETKDEEEEKEEENEDEEQEAQEFESIKRQLSKIPTNKEKDEEAIHKDYNQNNTEDGKLMASEDRAINGIKLDVYKKYIHYGSGKIGSLVMCFAIVLAVVLATFCQLFTNTWLSFWTEKKFPGKSDGFYIGFYVMFAVLSGLLIMIEFIFFVLLTNTASKNLNILAVKKVLHAPMSFMDTTPMGRILNRFTKDTDALDNELGDQIRMLFFFFGNIAGVLILCVIYLPWFAIAIPFLVALFIGVANYYQASAREIKRLEALQRSHVYNNFNETLNGMNTIKAYKADHIYLRKNEFFLNKMNEAYYLTIGNQRWLAIHLDCLATIFALIIALLCVFRVFSIGPASVGLLLSYVLQIAGQLSMLIRTYTQVENEMNAVERMCSYAFDLPQEAPFKISETTPPPEWPEQGSIKFEDVSLAYRPGLPLVLKNLSLQVEPSQKIGICGRTGAGKSSIMTALYRLSELSTGKIEIDGIDISSLGLSSLRSKLSIIPQDPVLFQGTIRKNLDPFNEHPDDLLWDSLRRAGLIEEAKLKSVKRQNDESEEYHKFHLNQEVEDDGANFSLGERQLIAFARALVRDSKILILDEATSSVDYETDNKIQSTIVREFSKCTILCIAHRLKTILNYDKILVLDKGEIKEFDTPWNLFNTEDSIFQQMCERSNITVEDFQNLQRM

SEQ ID NO: 959 - DNA, 4221 bp, Candida duobushaemulonis
  source 1..4221: mol_type = other DNA
atggtcgaattggaaaagggttccgaaccagaattgcaacatagattattgaccccattcctgtctaaaaaggttccaccagttccacatgatgaagatagaccatatcatccaaaatggcgtaacccattctctttcttgtttttcacttggttgaccccagttttgttggttggttacaaaagaactttgttgccagaggacatgttcaagttgcatgaaggtattactgctgaacatttggccgaaaagttccaaagaatcttcgacagaagattggcccaagataagcaaagacacttgaaagaaaaagctaaggctagaggtgaaaccttggaaacttcttctgttgaatccgttgatgacatggctgattacgaattgtctaagtctttgtgcttcttgaccttgtacgaaactttcgctagacaatactctttggctttggtttttgctaccttgggtatgtcttgttctacctgtattcctttgttgtcccgtaagctgattaacttcgtttctgaaaaagcctacggcttcaatttgaatatgggtactggtgttggttacgctattggtgttgctattttgatcttcactggtgacgttttgattaaccagggtgtttacttgtctatgattaccggtgctcaaattagagctgttttcaccaagttgttgctggacaagtcttttaagttgaacgccaagtctagaaagcaattcccagcttctaagattaccgctattatgtctaccgatgtttccagagttgacttaggtactggtttttctatctacggtttcgtgtttgttttcccagttggtatttccattggtatcttggtctacaacattaaggctccagctatggttggtgtaggtttgatgattgcctttttgttcgttgctggtattttgggtgctatgttgttctctttcagaaaaaccgctcaaaagtccactgatgctagagtttcttacatgaaggaagtcctgaacaacctgaagatgatcaagttttactcttgggaaaagccctacttcagcttgatttccaaaatcagacgtagagaaatggcctacttgttgagaatggaaatcacgagaatgatcataatcaccttggcttcatctctgaccttgatttcttctttggcatccttcttgactctgtatgctattgcttctccatcttctagaaatccagccgatattttctcatccgttgctctgtttaatatgttggctggtcaattcgttgtcctgccattgtctattgctggttctactgatgcatttttgggtatgaatagagttgctgctgttttggctgctgacgaaattgatccaaaagattccgttagattgatcaccgatgacgaaagaactgctatgcaagaaaacaagttggctgtttctgttagagattgcgatttcgaatgggagatcttcgatttgaaagaggaaaagactgaggaccaaacgaaggataacaaagagctgaaaaaagaaaagaaagaaatgaagaagaaaaagaaagaagagaagaaagcccagaaggcctctaaatctaattctccatcacctgaagttgacgaaaagacaggtgaagtttctagcttcaagttgaacaacatcaacttggatgttaaggacggtgaattcgtcgttattacaggttctattggttccggtaagtcctctttgttgcatgctttggatggtacgatgaagaaaaactctggtaagttgttgttgaacggttccttgttgatgtgtggtgttccatggattcaaaacaacaccttgagagagaacatcttgtttggttctccatatgacgaagcttggtacaacaaggttgttgaagcttgttctttgaactccgattttgatttgttgcctgctggtgatagaaccgaaattggtgaaagaggtattacattgtctggtggtcaaaaagccagagtttgtttggctagaactgtctacgaagattcctccattatcttgttggatgatgttttgtcagctgttgatgccaaggttggtaagcacattatgaacgaatgtttgttgggcctgttgaagaacaaaactagaattttggctacccaccagctgtctttgatttctgaagctgaatctgtcgttttcttgaacggtgatggttctatttctaggggttctttcgaagaattgaagagatctaatccagccttcaacactttgatggaacactctagaaagaacgaggattctgatgacgaagaagaagatttgaagggcgctccagacgaaaaagaattgattaacagacagttgaccagacaaaccaccactcaaatttctgacgattctaacgaatctggtttgccagaaggtgacggtaaattgattggagaagaggaaagatccattaacgcaattggttgggatgtttacggtagatatgttttgaccggtgttgatggttttaagctgaattggccagtttacttggttttcggtgctactgtttttaccacgttcttgactttgttcacgaacaactggttgtccttttggatacaaatgaagtgggattactccgacggttactatattggtctatacgctatgtttaccgctttggctgttatgttcatgattacccaattctgcggtgtcatctacattttgaatagagcctccagaatcttgaacatcaaggctttggaaaggatcttgcatgttccaatggcttttatggatacaactccaatgggtagagtgatcaacagattcactaaggatactgataccttggataacgaaatcggtgatagagtttccatggtcgtctactttttgtctgatatcgttggcattatcatcctgtgcattatctacatgccatggtttgctattgccgttccattcattatcggtttcttcattattctggctaccttctatcaagcctctggtagagaagttaagagattggaagctatccaaagatcccacgtgtacaacaatttcaacgaatctttgactggtatgccaaccattaaggcctttaagtctattggtagattcctggaaaagaacgtcaagacgattaacaagatgaacgaagcctactacattaccgttgctaatcaaagatggttggatgtccatttgtctatgttggcatcatctttcgctttcttgattgccatgttgtgcgttttcagagttttcaatatcaacccagcttccgttggtttgttgttgtcttatgtcttgcaaatctcctccaccgtttcaatgttggttgtcgtttttactcaagtcgaacaggatatgaactctgccgaaagagttatcgaatacgtttacaagatccctcaagaaaaggcctacgaaatctctgaaacaaaaccagctccagaatggccagctcatggtgaaatcaagtttattaacgttggtttcgcctacagagaaggtttgccattgactttgaagaacttcaacgtcgatattaagccacacgaaaagattggtatttgtggtagaactggtgccggtaaatcttctattatggttgccttgttcagaatcgctgaattgtctgctggttccatagttattgatggtgttgatatctctactttgggcttgcatgatttgagatccagattgtccattattccacaagatccagtcttgttcaagggcaccattagaaagaatttggatccattcggtactaagaccgacgaagaattatgggatactttgagaagggccgatatcatttctgctgaaactttggaagaagtcaaggctcaaaaaccaggtgatgatgatttcaacaagttccacttggatggtgaagttgatgatgaaggtgaaaacttctcattgggtgaaagacaattagttgcttttgctagagccttggttagaaacaccaagattttggttttagacgaagccacctcttcagttgattatgctactgattctaagctgcaaaaggctattgccagagaattttctggttgtaccattttgtgcattgcccacagattgaaaaccatcttgaactacgataggatcatggttatggaccaaggttccatttctgaattcgatactccaacgaacctgttcaactctacatcttctttgttcagacaaatgtgcgacaagtccggtatctctcaattcgattttgaagagtaa

SEQ ID NO: 960 - protein, 1406 aa, Candida duobushaemulonis
MVELEKGSEPELQHRLLTPFLSKKVPPVPHDEDRPYHPKWRNPFSFLFFTWLTPVLLVGYKRTLLPEDMFKLHEGITAEHLAEKFQRIFDRRLAQDKQRHLKEKAKARGETLETSSVESVDDMADYELSKSLCFLTLYETFARQYSLALVFATLGMSCSTCIPLLSRKLINFVSEKAYGFNLNMGTGVGYAIGVAILIFTGDVLINQGVYLSMITGAQIRAVFTKLLLDKSFKLNAKSRKQFPASKITAIMSTDVSRVDLGTGFSIYGFVFVFPVGISIGILVYNIKAPAMVGVGLMIAFLFVAGILGAMLFSFRKTAQKSTDARVSYMKEVLNNLKMIKFYSWEKPYFSLISKIRRREMAYLLRMEITRMIIITLASSLTLISSLASFLTLYAIASPSSRNPADIFSSVALFNMLAGQFVVLPLSIAGSTDAFLGMNRVAAVLAADEIDPKDSVRLITDDERTAMQENKLAVSVRDCDFEWEIFDLKEEKTEDQTKDNKELKKEKKEMKKKKKEEKKAQKASKSNSPSPEVDEKTGEVSSFKLNNINLDVKDGEFVVITGSIGSGKSSLLHALDGTMKKNSGKLLLNGSLLMCGVPWIQNNTLRENILFGSPYDEAWYNKVVEACSLNSDFDLLPAGDRTEIGERGITLSGGQKARVCLARTVYEDSSIILLDDVLSAVDAKVGKHIMNECLLGLLKNKTRILATHQLSLISEAESVVFLNGDGSISRGSFEELKRSNPAFNTLMEHSRKNEDSDDEEEDLKGAPDEKELINRQLTRQTTTQISDDSNESGLPEGDGKLIGEEERSINAIGWDVYGRYVLTGVDGFKLNWPVYLVFGATVFTTFLTLFTNNWLSFWIQMKWDYSDGYYIGLYAMFTALAVMFMITQFCGVIYILNRASRILNIKALERILHVPMAFMDTTPMGRVINRFTKDTDTLDNEIGDRVSMVVYFLSDIVGIIILCIIYMPWFAIAVPFIIGFFIILATFYQASGREVKRLEAIQRSHVYNNFNESLTGMPTIKAFKSIGRFLEKNVKTINKMNEAYYITVANQRWLDVHLSMLASSFAFLIAMLCVFRVFNINPASVGLLLSYVLQISSTVSMLVVVFTQVEQDMNSAERVIEYVYKIPQEKAYEISETKPAPEWPAHGEIKFINVGFAYREGLPLTLKNFNVDIKPHEKIGICGRTGAGKSSIMVALFRIAELSAGSIVIDGVDISTLGLHDLRSRLSIIPQDPVLFKGTIRKNLDPFGTKTDEELWDTLRRADIISAETLEEVKAQKPGDDDFNKFHLDGEVDDEGENFSLGERQLVAFARALVRNTKILVLDEATSSVDYATDSKLQKAIAREFSGCTILCIAHRLKTILNYDRIMVMDQGSISEFDTPTNLFNSTSSLFRQMCDKSGISQFDFEE

SEQ ID NO: 961 - DNA, 4221 bp, Candida haemuloni
  source 1..4221: mol_type = other DNA
atgaccgaattggaaaaggctgatccaccagttttacaaaagagattattgacgcccttcctgtctaaaaaggttccacctgttccattggaagatgaacgtccatatcatccaaaatggcgtaatccattctcgttcttgtttttcacttggttgactccagttttgagaagaggttacaagagaacattgcagccagaagatatgttcaagttgcatgatcaaatgaccgctgaatacttggctggtaagttcgaaagaatcttctacagaaggttggctgctgacaaagaaagacatttgttgcaaaaagccgaatccagaggtgaaactttggaaacttcttccgttgattccgatgatgatttcgctgattaccaattgccaaagtctttgtgcttcttgtccttgtacgaaacttttgcttggcaatactctttggctttgttctttggtgttttgggtatgtcttgttctacctgcattcccttgttgtccaaagaattgatcaacttcgtttccgctaaggcttttggtatggatgttaatatgggtagaggtgttggttacgctattggtgtttccattttgatcttcactggtgacatcttgattaaccagggtatctacttgtctatgttgaccggtgctcaaattagagctattttcaccaagttgctgctggacaagtcttttaagttgaacaccaagtccagaaagcaattcccagcttctaagattacctccattatgtctaccgatgtttccagagttgacttaggtactggtttttctatctacggcttcatcttcattttcccagttggtatttccatcggtatcttggtttacaatattagagcaccagctatggttggtgtcggtttgatgattgcatttttgtttgttgccggcttcctgtcctttttgttgttttcttttagacaaacggcccagaaatccactgatgctagagtttcttacatgaaggaaatcctgaacaacctgaagatgatcaagttctactcttgggaaatcccctacttcaagttgatttccaagatcagacgtagagaaatggcctacttgttgagaatggaaattacccgtatgatcattatcaccttggcctcatctttgaccttgatttcttcattggcttcgttcctaaccttgtacggtattgcttctccatctgctagaaatccagcagatattttctcttctgttgccctgtttaatatgttggctggtcaattcgttgtcctgccattgtctttggctggttctactgatgcattcttgggtatgaatagagttgctgcagttttagctgctgacgaaattgatccaaacgattccgttcatatgatcaccgattctgaaatcacttccatgcaagaaaagaagttggccatctctgttagagattgtgatttcgaatgggaagtttttaacttcaaagaagagaagtctgaggatcagactaaggatactgaagagttgaagaaagaaaagaaagagctgaagcagaagaagaaagaagaaaagaaggccaacaagaagtccaagggttctaaatctccaactccagctagtgaagaaaaagaggctgaagttgcttcctttaagttgcacgatatcaacttggatgtacgtgatggtgaattcatggttattaccggttctatcggttccggtaaatcttctttgttgtatgctttggacggcaccatgaagaagaatgctggtaaattgctattgaacggctctttgttgatgtgtggtgctccatggattcaaaactctactttgagagaaaacatcaccttcggttctccatatgacgaaaaatggtacaacaaggttgttaacgcttgctctttggattccgatttcgatttgttgccagctggtgatagaactgaaattggtgaaagaggtattaccttgtctggtggtcaaaaagcaagagtttgtttggctagaactgtttacgctgactcctctattatcttgttggatgatgttttgtccgctgttgatgctaaagttggtaggcatattatgtccgaatgtatcttgggtttgctgaaggataagactgttgttttggctacccatcagttgtctttgatttctgaagctgaatccgtcgttttcttgaatggtgatggtactatttccagaggtactttcgatgaattgaagagaactaactctgctttcgctaccttgatggaacactctcaaaacaacgaggacaccgaagaagattcaaacgaacaaggtccaactaacgagaaagagttgattaacagacagttgactagacaaaccaccactcaagtttctgaagaaactgacgaaaagaacttcaccgaatctgatggtagattgatcatggacgaagaaagatccgttaatgctattggttgggatgtttacggcaagtacattttgactggtgttgaaggttttaaggccaactggttgatctacgttgttttcgctattactgtcttgactaccttcttgactttgttcaccaacaactggctgtctttttggatctctatgaagttcgatagatccgacggtttttacattggcttgtacgctatgtttaccgttttggctgttctgttcatggtttctcaattctgcggtgttatcttcatcttgaacagagcctctaggattttgaacattaaggccattgaaaggatcttgcacgtcccaatgtcttttatggacactactccaatgggcagagttatcaatagattcacaaaggataccgacaccttggataatgagataggtgatagagtctccatggtcaactactttttgtccgatttgatcggcattatcatcctgtgcattatctacatgccatggtttgctattgccgttccattcattattggcctgtttattatcgctgctaccttctatcaagcttctggtagagaagttaagagattggaagccatccaaagatcccatgtttacaacaatttcaacgagtccttatctggtatgccaaccatcaaaggttttggttctattggtagattcctgcagaagaacgttagcaccattaacaaaatgtccgaagcctacttcattaccgttgctaatcaaagatggttggatgtccatttgtcaatgttggcatcttctttcgctttcttgatctccatgttgtgcgttttcagagttttcgatattggtgcttcttcagtcggtttgttgttgtcctatgtcttgcaaatctcctccatgatttctatgttggtggttgttttcacccaagtcgaacaagatatgaactctgctgaaagagtcatcgaatacgtttacaagatcccacaagaaaatgcttaccagatctctgaaacaaagccttctccagaatggccacaaaatggtgaaattagattcttgaacgttgacttcgcttacagagaaggtttgccattgacactgaagaactttaacgctgatattaggccacacgaaaagattggtatttgtggtagaactggtgcaggtaagtcatctattatggttgccttgttcagaattgctgaattgacttccggtactattgaaatcgatggtgttgatgttagaaccttgggtttacacgatttgaggtccaagttgtccattattccacaagatccagtcttgttcaagggcactattagaaagaatttggacccattcggtactaagtctgatgatgaattgtgggataccttgagaagatccgatattatctctgccgataagttggaagctgttaaggctcaaaaagttggtgatgatgactacaacaagttccacttggattctgaagttgatgacgaaggtgaaaacttctctttgggcgaaaaacaattggttgcttttgctagagctttggtgagaaactccaagattttggttttagacgaagctacctcctctgttgattatgctactgattctaagttgcaaaaggctatcgctagagaatttgctgattgcaccatattgtgcattgcccatagattgaaaacgatcttgaactacgatcgtgttatggttatggaccagggtgagatcaaagaattcgatactccaagaaacctgttcaactccagaaacaccattttcagacaaatgtgcgataagtccggtatttctacttctgatttcggtgcttga

SEQ ID NO: 962 - protein, 1406 aa, Candida haemuloni
MTELEKADPPVLQKRLLTPFLSKKVPPVPLEDERPYHPKWRNPFSFLFFTWLTPVLRRGYKRTLQPEDMFKLHDQMTAEYLAGKFERIFYRRLAADKERHLLQKAESRGETLETSSVDSDDDFADYQLPKSLCFLSLYETFAWQYSLALFFGVLGMSCSTCIPLLSKELINFVSAKAFGMDVNMGRGVGYAIGVSILIFTGDILINQGIYLSMLTGAQIRAIFTKLLLDKSFKLNTKSRKQFPASKITSIMSTDVSRVDLGTGFSIYGFIFIFPVGISIGILVYNIRAPAMVGVGLMIAFLFVAGFLSFLLFSFRQTAQKSTDARVSYMKEILNNLKMIKFYSWEIPYFKLISKIRRREMAYLLRMEITRMIIITLASSLTLISSLASFLTLYGIASPSARNPADIFSSVALFNMLAGQFVVLPLSLAGSTDAFLGMNRVAAVLAADEIDPNDSVHMITDSEITSMQEKKLAISVRDCDFEWEVFNFKEEKSEDQTKDTEELKKEKKELKQKKKEEKKANKKSKGSKSPTPASEEKEAEVASFKLHDINLDVRDGEFMVITGSIGSGKSSLLYALDGTMKKNAGKLLLNGSLLMCGAPWIQNSTLRENITFGSPYDEKWYNKVVNACSLDSDFDLLPAGDRTEIGERGITLSGGQKARVCLARTVYADSSIILLDDVLSAVDAKVGRHIMSECILGLLKDKTVVLATHQLSLISEAESVVFLNGDGTISRGTFDELKRTNSAFATLMEHSQNNEDTEEDSNEQGPTNEKELINRQLTRQTTTQVSEETDEKNFTESDGRLIMDEERSVNAIGWDVYGKYILTGVEGFKANWLIYVVFAITVLTTFLTLFTNNWLSFWISMKFDRSDGFYIGLYAMFTVLAVLFMVSQFCGVIFILNRASRILNIKAIERILHVPMSFMDTTPMGRVINRFTKDTDTLDNEIGDRVSMVNYFLSDLIGIIILCIIYMPWFAIAVPFIIGLFIIAATFYQASGREVKRLEAIQRSHVYNNFNESLSGMPTIKGFGSIGRFLQKNVSTINKMSEAYFITVANQRWLDVHLSMLASSFAFLISMLCVFRVFDIGASSVGLLLSYVLQISSMISMLVVVFTQVEQDMNSAERVIEYVYKIPQENAYQISETKPSPEWPQNGEIRFLNVDFAYREGLPLTLKNFNADIRPHEKIGICGRTGAGKSSIMVALFRIAELTSGTIEIDGVDVRTLGLHDLRSKLSIIPQDPVLFKGTIRKNLDPFGTKSDDELWDTLRRSDIISADKLEAVKAQKVGDDDYNKFHLDSEVDDEGENFSLGEKQLVAFARALVRNSKILVLDEATSSVDYATDSKLQKAIAREFADCTILCIAHRLKTILNYDRVMVMDQGEIKEFDTPRNLFNSRNTIFRQMCDKSGISTSDFGA

SEQ ID NO: 963 - DNA, 4233 bp, Clavispora lusitaniae
  source 1..4233: mol_type = other DNA
atggatcatgaatccgctgctttttcatctagagcaccaccattgagacaaaacagattattgtctcctctgttcaccaaaaaggttccaccagttccacaagatcacgaaagacatacttatcccttgtacggtaatccaatctcctggtttttctttacttggttgtggccagttatgatcactggttacaaaagaactttggaaccagacgacctgtacaagttgaatgataagttgaaagctgatgctttggctgctagattcgaagctatttttgctagaagattggccgaagataagagaaggcatttggatcaaactctggactcctctaagatctctaactcttctaagaactcctccaactctccagatttggatgatttggccgatttggctgactatgttccatctgatactttgtgtttgtggtccttgttcgaaactttcaagtggcaatatttgaccgcttgtttcttgtgtgctttagctcaagttggttggacttgtaatcctctgttgtccaagaaattgatcgcctacgttcaaagaaaggccttgggtattgaatctgatacaggtaaaggtgttggttacgctttgggtgtttctttggttgttttctgctccgacatcttgtttaaccagatgtactacttgtcctctttgactggtgctgaatctaaggctattttcaccaaagttatgctggacaagtccttcagattgaatgctagatcaagaagagtttaccccgtttccaagattacctctattatgtctaccgatgtctccagaatcgatttgggtttagctactgctccaatgattatagttgctccagttccattggccatttccattggtattttgatccataacttgaaggctccagccttgttaggtattggtatcatgattttgttcttgggtttcgctggtttcttgggtagtttgttgtttaagtacagaaagttggctactacccaaaccgatgctagagtttcttatatgaaggaagtcctgaacaacctgaagatgatcaagttttactcttgggaaaagccctacatggctatgattaaggctgtcagagaaaaagagatgaccttcttgttgaagatgcaagtcaccagatccatcattatttccgttgctgtttccttgtctttggtagcttcttttgctagcttcatgttgttgtatggtactgcctctgtttctaagagaaatccagcttctatcttctcttctgttgccctgttcaatattttggcctccgtttttatcaacctgccattggctattgctggtgctactgatgcttatattggtatgagaagagtcggtcaatacttggcttctgatgaacacgttgaggataagaagagagttacttctgaaaccgacagacaattgatggaagaaaagaatttggccatcaccgtttctaacgctaatttcgaatgggaaatcttcgatatcccagacgaggaaaagatcaaagaagaaaagaagaaacaaaaggacaaagagaagaacgacaaaaagaacaagaaaaagaagttgtcctccgacgaatcttctcatgaagctgttacacaatctgaaaagccaacttctgctgctacctttaagttgagaaacatcgatttgaccatcatgaagggtgaattcgttgttgttactggttctatcggttccggtaaatcatctttgttgttggctttggaaggttccatgaagagaaattctggtcaagttaagaccaacggctctttgttgatgtgtggtgctccatggattcaatcctctactattagagaaaacgtcattttcaacaacccctacaacaagtcttggtacgaacaagttattgatgtttgctgcatggactccgatttggaaattttgccagctggtgatcaaaccgaaataggtgaaagaggtattactttgtctggtggtcaaaaggctagattgtctttagctagagctgtttacgctagatccgatatcattttgttggatgatgtcttgtctgctgttgatgctaaagttggtaagagaatcgttgacgaatgtatcttaggtgtcttgagaaagaaaaccgttgttttggctactcaccagttgtccttgattgaatcagcagataagatcgtgttcttgaatggtgatggtacagttgatgttggtacttccgaatctttgagaagatctaacgaagccttccagaagttgttgtctcattctactactgaaaagtacgccgaagaggaatcctctatttcttcacaaactgacgagtccatcaagaaggttgttgttgaagctcagatttccagattgacttccgtttcttcaactaacgaaaagaccgacttgcaaaagcagaacgaaggtaaattgatcatggaagaggaaaagtccgttaacgctattaacgctgatgtttacgttaggtacattttcgcaggtattccaggtgttaagggtgctatgatttttgctgctgttatcatcttctccatcctgtccgttttctttaacttattcacttccacctggttgtctttttgggttgagtacaaatggcgtaatagatctgatggtttctacattggtttttacgctgctttcacagttttggccttggttactttgacttttggtttctctggtgtcatctacgtcatgaacttatcttctagaaccttgaacattagagccgccgaaagaatcttgtatgttccaatgtcttacatgaacgttaccccaatgggtagaatcattaacagattcactaaggataccgacgtgttggataacgaaatgggtgatagaatgggtatgattatctacttcgcctccattattggtggcgttttgattttgtgtatcatctacttgccatggttcgctatagctgttccatttttgattgtcgttttcttcggttttgctaacttctaccaagcttctggtagagaaatcaagagattggaagctgttcaaaggtccttggtctacaacaatttcaacgaaactttgaccggtttggataccattagaggttacgataagaccgatgtgttcctgtctaagaacatcagattgatcgacaagatgaacgaggcttacttcattaccgttgctaatcaaagatggttggatgttgcagtttctttcttggctacaattttcgccatcatcatctcattcttgtgcgtgtttagagtgttcaagattaacgcttcttccgttggtttgctgttgtctaataccttgcaaatctccggtattatcaccacattggttgtcgtttacaccagagttgaacaagatatgaactccgctgaaaggatcatcgaatacgttgatgatttgccacaagaagctccatacaccatttctgaaactactccaaatccatcttggcctcaacaaggtcaaattgactttaaccatgttaacttggcttacagaccaggtttgccaatggttttgaaggatttcaccgttcatattgacccaaacgagaagatcggtatttgtggtagaacaggtgctggtaaatcttctattatggttgccttgtacagaatggtcgaattgacctctggtaacattaccattgatggtatcgatatcagaaccttgggcttgaacaatttgaggtccaagttgtccattattccacaggatccagttttgttccaaggcactattagaaagaacttggatccatttggttccgctacagatgaacaattgtgggaaactttaagaagggccagaatcatcaagtccgaagatttgaatgaagtcaagtctcaaaccgatcctaacaagatgcataagttccacttggatagagatgttgatgtcgatggtgaaaacttctccttgggtgaaaaacaattgattgcttttgccagagctttggtcagaggttctaaaatcttgattttggatgaagccacctcctcagttgattatgcaaccgataagatattgcaagaagccatcgttgaagaattctccgattgcactattttgtgcattgcccatagactgaaaaccatcttgaactacgatagagttatggtcatggatcaaggtcaagttgttgaattcgataagcccatcaacctgtttaagaagcaaggtactttcttccagatgtgtgaaaaggctggtatcaacgaaaaagaattcggtcactga

SEQ ID NO: 964 - protein, 1410 aa, Clavispora lusitaniae
MDHESAAFSSRAPPLRQNRLLSPLFTKKVPPVPQDHERHTYPLYGNPISWFFFTWLWPVMITGYKRTLEPDDLYKLNDKLKADALAARFEAIFARRLAEDKRRHLDQTLDSSKISNSSKNSSNSPDLDDLADLADYVPSDTLCLWSLFETFKWQYLTACFLCALAQVGWTCNPLLSKKLIAYVQRKALGIESDTGKGVGYALGVSLVVFCSDILFNQMYYLSSLTGAESKAIFTKVMLDKSFRLNARSRRVYPVSKITSIMSTDVSRIDLGLATAPMIIVAPVPLAISIGILIHNLKAPALLGIGIMILFLGFAGFLGSLLFKYRKLATTQTDARVSYMKEVLNNLKMIKFYSWEKPYMAMIKAVREKEMTFLLKMQVTRSIIISVAVSLSLVASFASFMLLYGTASVSKRNPASIFSSVALFNILASVFINLPLAIAGATDAYIGMRRVGQYLASDEHVEDKKRVTSETDRQLMEEKNLAITVSNANFEWEIFDIPDEEKIKEEKKKQKDKEKNDKKNKKKKLSSDESSHEAVTQSEKPTSAATFKLRNIDLTIMKGEFVVVTGSIGSGKSSLLLALEGSMKRNSGQVKTNGSLLMCGAPWIQSSTIRENVIFNNPYNKSWYEQVIDVCCMDSDLEILPAGDQTEIGERGITLSGGQKARLSLARAVYARSDIILLDDVLSAVDAKVGKRIVDECILGVLRKKTVVLATHQLSLIESADKIVFLNGDGTVDVGTSESLRRSNEAFQKLLSHSTTEKYAEEESSISSQTDESIKKVVVEAQISRLTSVSSTNEKTDLQKQNEGKLIMEEEKSVNAINADVYVRYIFAGIPGVKGAMIFAAVIIFSILSVFFNLFTSTWLSFWVEYKWRNRSDGFYIGFYAAFTVLALVTLTFGFSGVIYVMNLSSRTLNIRAAERILYVPMSYMNVTPMGRIINRFTKDTDVLDNEMGDRMGMIIYFASIIGGVLILCIIYLPWFAIAVPFLIVVFFGFANFYQASGREIKRLEAVQRSLVYNNFNETLTGLDTIRGYDKTDVFLSKNIRLIDKMNEAYFITVANQRWLDVAVSFLATIFAIIISFLCVFRVFKINASSVGLLLSNTLQISGIITTLVVVYTRVEQDMNSAERIIEYVDDLPQEAPYTISETTPNPSWPQQGQIDFNHVNLAYRPGLPMVLKDFTVHIDPNEKIGICGRTGAGKSSIMVALYRMVELTSGNITIDGIDIRTLGLNNLRSKLSIIPQDPVLFQGTIRKNLDPFGSATDEQLWETLRRARIIKSEDLNEVKSQTDPNKMHKFHLDRDVDVDGENFSLGEKQLIAFARALVRGSKILILDEATSSVDYATDKILQEAIVEEFSDCTILCIAHRLKTILNYDRVMVMDQGQVVEFDKPINLFKKQGTFFQMCEKAGINEKEFGH

SEQ ID NO: 965 - DNA, 4224 bp, Candida auris
  source 1..4224: mol_type = other DNA
atggccgaattggaaaagggtgatgatgctcaaccagctttacaacatagattgtgtacacccttgttgtccaaaaaggttccaccagttccaagagatgaagatagaccagttcatccaaaagctaccaatccattctcttggtttttcttcacttggttgactccagttttgttgagaggttacaagagaactttgttgccagaggatatgttcaagttgcatgacgaaatgaccgttgaacatttggctggtaagttccaagctatcttcgatagaagattggctgctgataagaggaagtacttgaaaaagagaaggcaattggccttgaagaaaggtgattctgatgtttctgctagaaccgacgaagatttgatgttggaatacgaaccatctaagtccctgtgtttcttgtccttgtacgaaacatttttgtggcaatactccatggctttgttgttcggtatgttgggtttagttggtcaagcttgtaatcctttgttgtcccgtaagttgattaacttcgttgaattggaagccttgggtatcccaacaaaaattggtactggtattggttacgctttcggtgttgctattttgatgtttgtttccgacgtcttgcacaatcaaggtgtttattttgctatgttgaccggtgctcaaattagagctattttcacaaaagccctgctggacaagtctttcaaattgaataccagatcgaggaagaagttcccaccatctaaaattacctccatcatgtctaccgatgtttccagagttgacttaggtacaggtttttctatctacggtttcgttttgatcgttccagttggtgtttccattggtatcttgatctacaacattaaggctccagctatggttggtgttggtttgatgttagctttcttgttcgtttctggtggtttgtctaccttgttgttctctttcagaaaaaccgctcaaaaggctaccgattctagagttggttatatgaaggaagtgctgaacaacctgaagatgatcaagttttactcttgggaaaagccataccatgccttgattactaagatcagacgtagagaaatggcctacttgttgagaatggaaattacccgtatgatcattattaccttggctgcttctttggccttggtttcatctttggtttctttcttgacgttgtacgctattgcttctccatcttctagaaatccagccgaaattttctcctccgtttctttgtttaacttgttggcctctcaattcttggtcttgccattgtctattgctggttctactgatgcatttttgggtatgaatagagttgctgctgttttagctgctgacgaaattgatccagaagatgctgataccattttgtcagaaagagcacaagctttgttggaagaaaagaagttggctatcactgttcaagacggtgaattcgaatgggagttgtttgattttgacgacgaaaagtctgaagaaaccgaagaacataaggacgagtccaagaaaaagaagatgaagaaagagtcgaagaagaaggtcaagaagtccaccaaagatatctctgatacttcttccgcttcctccaatgagaaagagagaaagtcttttaagctgcacaacgtgaacttggatattagacaaggtgccttcgttgttattaccggttctattggttctggcaagtcatctttgttgcatgctttggatggtgccatgaagaaattgtctggtgatgtttacgttaacggctctttgttgatgtgtggtactccttggattcaatctgcttcattgagagagaacatcttgtttggttctacctatgacgaaacctggtacaaagaagttattagagcttgcttcttggagtccgatttcgatattttgccagctggtgatttgaccgaaattggtgaaagaggtattactttgtccggtggtcaaaaagctagagtttgtttggctagaactgtttacgctaactcctccattatcttgttggatgatgttttgtctgctgttgatgccaaggttggtaaacatattatgtccgaatgcatcatgggtatcttaaagggtaagactagagttttggctacccaccaattgtccttgatttctgaagctgaacacgtcattttcttgaatggtgatggtactatctccaggggtacttttgaagaattgaagtctaccaactctgccttcaaggctttgatggaacataaccgtaaatccgaagaaaacgatgaggatgaatctgaaccagcatccgaattagaagtctccgaaaaagaattgatcaagaggcaattgactaagcagactactacccaagtttcctctgattctgttgaaaaggtagaattggatggcaagttgtacgatgaagaagaaaaatccgttaacgccattggttgggatgtttatggtcgttacattttgactggtgtccaaggttttaagttcaactggttgttgtttgtcatcctgtgcttgtgtattttgggcacttttatgtctctgttcaccaacaattggctgtctttttggatctccagaaagtttgatcaatccgccggtttttacattggtttctacgctacttttaccggtttggctgttatcttgatggtgttccaattctgctccatcatcttcgttatgaacagagcctctaggatcttgaatattaaggctttgggtaagatcttgcacgtcccaatgtctttcatggatacaactccaatgggtagaatcctgaacagattcactaaggatactgacaccttggataacgaaatcggtgatagagtcggtatggttgttaacttcactttcgaaatttggggcgttatcatcatgtgcattatctacatgccatggtttgctattgctgttccttttatcgttgccgtgttcattattatggctaacttctatcaagcctccggtagagaagttaagagattggaagctgttcaaagatcccacgtttacaacaacttcaacgaatctttaactggtatgccaaccattaaggccttcaagtccattcagagattcttgaacaagaacattgccacgatcaacaagatggatgaggcttactttgttaccgttgctaatcaaagatggttggacacttacttgtctttgttggctactttgttcgccttgttgattgctttgttatgtgcttgcagagtgttcgatattggtgcttctgcagttggtttgttagtttcctacgttctgcaaatctccggtttgatttctatgttggttgtcgttttcacccaagtcgaacaagatatgaattctgctgaaagagtcctggattacgtctacaaaattccacaagaaaggccatacgaaatctccgaaactagaccaccacctgaatggcctcaaaatggtgaaattcaattcatcaacgtcgacttcgcttacagagaaggtttgccattgactttgagaaacattaacgccgatattaagccacacgaaaagattggtatttgcggtagaactggtgctggtaaatcttcaattatggtcgctttgttcagaatcgccgaattgacttctggttccattatgattgatggcatcgatgtttctactttgggcttgcatgaattgaggtccaacttgtctattattccacaggatccagtcttgtttaagggcactattaggtctaatttggacccatttgaaactaagaccgatgacgaattgtgggatactttaagaagggctgatattattgatgccacctctttggaacatgttaagactcaacgtgttggtgatgacgatttccataagttccacttggataatgaggttgatgacgaaggtgaaaacttctctctaggtgaaaaacaattggttgctttcgctagagctttggttagagataccaagattatcgttttggacgaagctacctcttctgttgattatgctactgactctaagttgcaaaaggccatcgttagagaattttccgatagaaccatattgtgcattgcccacagattgaaaaccatcttgcattacgatagagtcatcgtcatggaacagggtgaaatcaaagaattcgatactccatctcacctgtacaactctactggtactattttcagacaaatgtgcgacaagtccggcatctctaaagaagatttttacgagtggtaa

SEQ ID NO: 966 - protein, 1407 aa, Candida auris
MAELEKGDDAQPALQHRLCTPLLSKKVPPVPRDEDRPVHPKATNPFSWFFFTWLTPVLLRGYKRTLLPEDMFKLHDEMTVEHLAGKFQAIFDRRLAADKRKYLKKRRQLALKKGDSDVSARTDEDLMLEYEPSKSLCFLSLYETFLWQYSMALLFGMLGLVGQACNPLLSRKLINFVELEALGIPTKIGTGIGYAFGVAILMFVSDVLHNQGVYFAMLTGAQIRAIFTKALLDKSFKLNTRSRKKFPPSKITSIMSTDVSRVDLGTGFSIYGFVLIVPVGVSIGILIYNIKAPAMVGVGLMLAFLFVSGGLSTLLFSFRKTAQKATDSRVGYMKEVLNNLKMIKFYSWEKPYHALITKIRRREMAYLLRMEITRMIIITLAASLALVSSLVSFLTLYAIASPSSRNPAEIFSSVSLFNLLASQFLVLPLSIAGSTDAFLGMNRVAAVLAADEIDPEDADTILSERAQALLEEKKLAITVQDGEFEWELFDFDDEKSEETEEHKDESKKKKMKKESKKKVKKSTKDISDTSSASSNEKERKSFKLHNVNLDIRQGAFVVITGSIGSGKSSLLHALDGAMKKLSGDVYVNGSLLMCGTPWIQSASLRENILFGSTYDETWYKEVIRACFLESDFDILPAGDLTEIGERGITLSGGQKARVCLARTVYANSSIILLDDVLSAVDAKVGKHIMSECIMGILKGKTRVLATHQLSLISEAEHVIFLNGDGTISRGTFEELKSTNSAFKALMEHNRKSEENDEDESEPASELEVSEKELIKRQLTKQTTTQVSSDSVEKVELDGKLYDEEEKSVNAIGWDVYGRYILTGVQGFKFNWLLFVILCLCILGTFMSLFTNNWLSFWISRKFDQSAGFYIGFYATFTGLAVILMVFQFCSIIFVMNRASRILNIKALGKILHVPMSFMDTTPMGRILNRFTKDTDTLDNEIGDRVGMVVNFTFEIWGVIIMCIIYMPWFAIAVPFIVAVFIIMANFYQASGREVKRLEAVQRSHVYNNFNESLTGMPTIKAFKSIQRFLNKNIATINKMDEAYFVTVANQRWLDTYLSLLATLFALLIALLCACRVFDIGASAVGLLVSYVLQISGLISMLVVVFTQVEQDMNSAERVLDYVYKIPQERPYEISETRPPPEWPQNGEIQFINVDFAYREGLPLTLRNINADIKPHEKIGICGRTGAGKSSIMVALFRIAELTSGSIMIDGIDVSTLGLHELRSNLSIIPQDPVLFKGTIRSNLDPFETKTDDELWDTLRRADIIDATSLEHVKTQRVGDDDFHKFHLDNEVDDEGENFSLGEKQLVAFARALVRDTKIIVLDEATSSVDYATDSKLQKAIVREFSDRTILCIAHRLKTILHYDRVIVMEQGEIKEFDTPSHLYNSTGTIFRQMCDKSGISKEDFYEW

SEQ ID NO: 967 - DNA, 4383 bp, Candida margitis
  source 1..4383: mol_type = other DNA
atggcttcctcttctgccttggaatccaatcaattgtctttggaaagacagaagaggctgttgtctttcttgatgtctaaaaacgttccaccagtgccaactcaagaagaaagaaaaccatatccaggtgctactgccaacgttattaagcaaattttcttttggtggttggccccagttatgaatactggttatcaaagaacattgcagccagacgatatgttctacttgaccgatgatatcaaggttcaaaagatggccgatgatttctacaggtacatgtccaacgatatcgacagatccaagcaaaaacatattgctgccaagtgcaaagaaagaggtgaaactgttgaaaccacttccgttgatcctgaagaggatttgaaagactacgagttgtctaagttcttgaccgtttgggctttagctaagacttttaaatggcagtatacctgggcttgtgtttgtttggctttgtctaatgctggtcaaactactatgcctctgctgtctaagaagttgatcaagtacgttgaattgaaggcttatggacaagaaccaggtattggtaaaggtttgggttactcttttggtactaccgccatggtttttatcgttggtgttttgatcaaccacttcttctacagatctatgattactggtgctcaagctaaagctgttttgactaaggctttgttggacaagtcctttaagttgtctgctgaagctaaacacaagtactccgttggtaagattacttccatgttgggtactgacttgtctagaattgatttcgctttgggtttccagccattcattatcgttttcccaattccaattgctatcgccattgccattttgatcgttaatattggtgttgcctctttggttggtgttggtattttgttggttttcatggttggtattgctttctctaccggtaagttgattgcttacagaaagaaggctaaccactacaccgattctagagtcaactacatcaaagaagccctgaacaacttgaaggtcatcaagttttattcttgggaaccaccataccacgaaaacatttctgacctgcgtaagaaagagatgaagatcatctacagaatgcaggtcttgagaaacgttgttacttctttcgctatgtccttgactttgttcgcttctatgactgcatttttggtcttgtacgctatctccaatggtaaaagagatccagcctctatcttctcctctttgtccttgtataacactttgacccaacaggttttcttgttgccaatggctttggctacaggtgctgatgcttttatgggtatttctagagttggtgacttcatgtcccaatctgaaatcaatccagaagaaaacgctattgaagctccaccagatgttcaagaatggatggacaaagaatccttgtctatcgatgttgaagatgcctctttcgaatgggaaattttcgaagatgatgaagagaaggacggcaagaattctaagaagaacggttccaaaaagaggaagtccgaagaaaacatcatcttggatgtgcaagactccgaatcttctttgacaaaaggtttagacggctcctctagttctgaagtttcatcagctgaagatgctcactttgaaggtttgaacaacatcgacttcaagatcaagaagggtgaattcgttgttatcaccggtttgattggttccggtaaatcatctttgttgtcagctatgtccggttttatgaagaggacttctggttccgttaatgtcaatggtagtttgttgttgtgtggttacccttgggttcaaaactctactgttaaggacaacattatcttcggttccgaattcgacgaagagaagtacaaaaaggttatctacgcttgctctttggaagctgacttggaattattgccagctggtgatagaactgaaattggtgaaagaggtattaccttgtctggtggtcaaaaggctagaatcaatttggctagagctgtttacgctaacaaggacatcattctgttggatgatgtcttgtcagctgttgatgcaagagttggtaaacacattatgaacaactgcctgctggatctgttgaaagaaaagacaagagttttggctacccaccagttgtctttaattggttctgctgatagagtcatcttcttgaatggtgatggttccattgatgtcggtactttcgaagaattgaaagagagaaatccaggcttcgataagttgatggcatacaactctgaatcccatgaggaagatgaagaagaagaagagaacttggaagaaatcgctgaagaggacctatttgaagatgacaagagagttgttgaaaggcagttgactagaagatctactagaactgttacatccgttggtgcttttcccgaagaagaatacgacgaagcagatgaagaggctagacatcatgagtacaatttggatgaacaagccgacggtaaattgatcggtgatgaagaaagagcagttaacgccatctctaaagaaatctacgctaggtacttcgaactaggttctggtagattgactccatgggttatgttgcctttgctgttgtttttcattgtcgttgctaccttctctcagattttcactaatacgtggttgtccttttggaccgagtacaaatttgataagccagacaagttctacatcggcatctatattatgttcgccttcctgtccttcatcttgttgaccattgaattcatcatcctggtcaagattaccaacactgcttctgttatgatgaacgttttggccgttaagaaagttttacatgccccaatgtctttcatggataccactccaatgggtagaatcttgaacagattcactaaggataccgatgtcttggataacgaaatcggtgatcaattgaggttcttcttgtacgttttcgccaacattattggtgtcgttatcttgtgcattatctacttgccttggtttgctattgctgtcccatttttgggtatgctgttcgtttctatctctaactactatcaagcttccgccagagaaatcaaaagattggaagcagttcaaaggtccttggtctacaacaatttcaacgaaactttgtctggtatggctaccattaaggcttacaaagctaccgaaagattcatcggtaagaacaactacttgattgacagaatgaacgaggcctactacattaccattgctaatcaaagatggttggccatccacatggattttgttgctactttattcgccttgctgattgctttgttgtgcgttaatagagtgtttaacgtttccgcttctgctgttggtttgattttgtcttacgtcttgcaaattgccggtcagttgtctatgttgattagaactttcacccaggtcgaaaacgagatgaattctgctgaaagattgaactcttacgctaccgatttgccagttgaagcaccatatgttattactgaaaacactccaccaccaaactggcctactcaaggtaacattactttcgatcatgtttccttggcttacagaccaggtttgccattggttttgaaggacttgaatttcactgttaaccccatcgaaaagatcggtatttgtggtagaactggtgctggtaaatcttctattatgactgccttgtacaggttgtccgaattggattcaggtagaatcgaaatcgatggtatcgacatttccaagttgggtttgagagatttgaggtccaagttgtccattattccacaagatccagttttgttcagaggtactatcagaactaacctggatccattcaacgaacatgaagatgatagattgtgggatgctttgagaagaacaggtttgatcgaagaatccagattggagtctgttaagaagcaatctaagtctactactaagccagctaccggtgaaatttctgaaaagactactgaaaaagctactgctaccccagattctttggcattgcataagtttcatttggatcaagccgttgaggatgatggttctaattttagcttaggtgagagacagttgatcgcttttgctagagctttggttagagactccaagattttgatattggatgaagccacctcctccgttgattacgaaactgattctaagatccaaaagacgatcatcagggaattcaaggattgcaccattttgtgcattgcccatagattgaaaaccatcttgaactacgacaggatcttggttttggataagggtgaagtcaaagaattcgatactccatggaatttgttcaacgccagaggttctattttccaacaaatgtgcgaaagatccaacgttaccgaacaagactttgcttcttccgttcaattctaa

SEQ ID NO: 968 - protein, 1460 aa, Candida margitis
MASSSALESNQLSLERQKRLLSFLMSKNVPPVPTQEERKPYPGATANVIKQIFFWWLAPVMNTGYQRTLQPDDMFYLTDDIKVQKMADDFYRYMSNDIDRSKQKHIAAKCKERGETVETTSVDPEEDLKDYELSKFLTVWALAKTFKWQYTWACVCLALSNAGQTTMPLLSKKLIKYVELKAYGQEPGIGKGLGYSFGTTAMVFIVGVLINHFFYRSMITGAQAKAVLTKALLDKSFKLSAEAKHKYSVGKITSMLGTDLSRIDFALGFQPFIIVFPIPIAIAIAILIVNIGVASLVGVGILLVFMVGIAFSTGKLIAYRKKANHYTDSRVNYIKEALNNLKVIKFYSWEPPYHENISDLRKKEMKIIYRMQVLRNVVTSFAMSLTLFASMTAFLVLYAISNGKRDPASIFSSLSLYNTLTQQVFLLPMALATGADAFMGISRVGDFMSQSEINPEENAIEAPPDVQEWMDKESLSIDVEDASFEWEIFEDDEEKDGKNSKKNGSKKRKSEENIILDVQDSESSLTKGLDGSSSSEVSSAEDAHFEGLNNIDFKIKKGEFVVITGLIGSGKSSLLSAMSGFMKRTSGSVNVNGSLLLCGYPWVQNSTVKDNIIFGSEFDEEKYKKVIYACSLEADLELLPAGDRTEIGERGITLSGGQKARINLARAVYANKDIILLDDVLSAVDARVGKHIMNNCLLDLLKEKTRVLATHQLSLIGSADRVIFLNGDGSIDVGTFEELKERNPGFDKLMAYNSESHEEDEEEEENLEEIAEEDLFEDDKRVVERQLTRRSTRTVTSVGAFPEEEYDEADEEARHHEYNLDEQADGKLIGDEERAVNAISKEIYARYFELGSGRLTPWVMLPLLLFFIVVATFSQIFTNTWLSFWTEYKFDKPDKFYIGIYIMFAFLSFILLTIEFIILVKITNTASVMMNVLAVKKVLHAPMSFMDTTPMGRILNRFTKDTDVLDNEIGDQLRFFLYVFANIIGVVILCIIYLPWFAIAVPFLGMLFVSISNYYQASAREIKRLEAVQRSLVYNNFNETLSGMATIKAYKATERFIGKNNYLIDRMNEAYYITIANQRWLAIHMDFVATLFALLIALLCVNRVFNVSASAVGLILSYVLQIAGQLSMLIRTFTQVENEMNSAERLNSYATDLPVEAPYVITENTPPPNWPTQGNITFDHVSLAYRPGLPLVLKDLNFTVNPIEKIGICGRTGAGKSSIMTALYRLSELDSGRIEIDGIDISKLGLRDLRSKLSIIPQDPVLFRGTIRTNLDPFNEHEDDRLWDALRRTGLIEESRLESVKKQSKSTTKPATGEISEKTTEKATATPDSLALHKFHLDQAVEDDGSNFSLGERQLIAFARALVRDSKILILDEATSSVDYETDSKIQKTIIREFKDCTILCIAHRLKTILNYDRILVLDKGEVKEFDTPWNLFNARGSIFQQMCERSNVTEQDFASSVQF

SEQ ID NO: 969 - DNA, 4470 bp, Candida theae
  source 1..4470: mol_type = other DNA
atggacgactcctctttggaaattggtaacgacttgtacaaaccacagaagagaattctgaccttcctgttcagaaacaagttctacccaattccaaaggacgactctgaaagaaaaatctacccagagcaatcctccaacatcttgtacagagttttcttttggtgggtgtctccattgatgactattggttacactagaaccttgcaaccagatgatttgtggattttgaccgaagatatgaaggtcgaacacttctacaactacttcgttacttacttgcaggttgaaactgaaagagcacatttggctcatattgccaacaagtgcaaagaaagaaacgaatccgttgaggactcttccaaatctagagaagaagatctgcaagacttcgtcttgtctccaatgaatattgctaccgttttgttcttgaccttcaagagacaaatcttggtcggtttgattttggccatcttttccttgtctggtattgcttgttctccactgttgaccaaagaattgattaagttcgtcgagaagagatccttgggtgttcatacaaatattggtcaaggtatcggttactctttgggtgttgttttcatgatgctgttctccaacttgttgttcaaccacttcatgtacatcggtcaatctatgggtgctttgattaaggctttgttgactaaggctgttttgaacaaggctttcaagttcaacgctgaatccagacataagttcccacaatctaagttgacctccattattaccaccgatttgtccagagttgaaatcgctgttatgttccaacctttgttgttgtgtttgccaattcctattgctatcgccatcgttatcttggttgttaacattagagtttccgccgttatcggtattgtcatcttcattattttcttgggcttcatctccattggtgccaaaaagttgtttgcttacagagatgccgtttccaagattactgataagagggtcaatttcatgaaggaaatcctgaacaacctgaagatgatcaagttttactcttgggaacatccataccacgaaaacgtatgtagagttagaggtgaagaggttgacatgatcttgaagattcaaaccttgaggaacgtgattttctctttggctatgactttgaccggtatctgttctatgattgctttcgtcatcttgtatgctatccagggttctacatcttctccagctaaaatgttttcctccgtttccacctttgaaatcttgggtttgatggttttcttcatcccacaagctttgtctactactgccgatatgattaacggtttcaagagaattggtgctgttttgtctgctgatgaagaggaaccatacgaaggttacagagaattgaatgatgcttccgataagagagctattgctttgaaagatgcctctttctcttgggatgttttcgatgacgaagaaggcgaagaggacgaagctgatggtgacggtgatggtgatgaagaagaagaaattgaagataagaaggacaagaaaaaggccaagaaagagaagaagcgtaaagagaaaggtaaggacactaagtctagtttcccatctacctcttccaacgatattgagttgtctaccattccaaagacctctccaaattctaaggctaacaacaagggtgaacaagaagaagctacttcatttccaggtttgaagaacatcgatttgaccattcataagggtgagttcatcgttattactggtttggttggttccggtaagtcatctttgttatctgctattgctggtttcatgtcttgcgattctggtgaagttgatattaacggtccattgctattgtgtggtgctccatggattcaaaacaataccatcagagagaacatcgttttcggtaagccattcgaccaagaatattacgataaggttatctacgcttgcgccttgaacattgatttggattctttggaaggtggtgattacactgaagttggtgaaaagggtattactttgtctggtggtcaaaaggctagaatcaatttggctagagctgtttacgccaacaaagaaatcatcttgatggacgatgttttgtcagcagttgatgctagagttggtaagcacattctaaacaactgctttttgggtttgttgggctctaagactagagttttggctactcatcaattgtccttgattggttctgctgacagaatcgttttcttgaatggtgatggttctatcgatgttggtaagatggatgaattgatcgccagaaacaacgactttaaccagttgatgaagttctctaagttggaggacattgaggaagaaaacttggacgttgaagttgaagaaatcgttgacgaaattgacttgggcaacaaagaatctaaggactctggtgaaatcgtgtccgttttctctcaaaatcaatccggtattgacacctctcaagaattgactagacgtagaaccagaatcttctcaaagtccgattctgacaacaacgacagcatggaagataatgatgttgagtacaaggactacaaccataacaaggatgctaccaagggtaagattatcacagaagaagagagagccgttaactccatcaagtttgatgtttaccacaagtacttaaagtacggtgctggtaaattgactccatggggtttctttactattttcgctgtcttgttgactttggctaccttctgtgacattttcactaacacttggttgtctttctggatcgaacaaaagttcgacggtaaatccaacggtttctacattggtttctacgtcatgttcaatgtcttgtgggttatcttcttgacttacaccttcgtgttcttcattcatggtactaccgtttcttctaagcacttgaatttgatggccattaagagaatcttgcatgccccaatgtctttcatggacactactccaatgggtagaattttgaacagattcaccaaggataccgatgccttggataacgaaatttctgataacctgaggttgttcttcaccgctattgctaaaatgatcggcgtgttcattctgatcatcatctatttgccatggttcgcttgtgctattccaggtattttcgtgctgttcttcttgattgctaacttctaccaagcctctaacagagaagttaagagattggaagccatcttgagatccttcgtttacaacaacgttaacgaagtcctatccggtatgaataccattaaggcctataaggatgaatccaggttcgctgatttgggtgatttgttattgaacaaagctaacgaagcctccttcgttgttaacgctaatcaaaaatggttgggtatccagttggatttgttggctgaattgattgtcttgatcgtgtccttgttgtgtgttaacagagtgttctctattaacgctgctgctgttggtttgttgatgacttatactttacaagtcgccaacgagctgttgaatttggttagaactttcaccttggtggaaaacgatatgaactccgccgaaagaattattcattacgccttgaaagttgaacaagaggccccatacaaaatcgattcttctcaaccaccaccagattggccacaatatggtgcagttgatttcaagaacgtcaacatgaagtatagaccaggtttgccattggttttgaaggacttctcattgaagattgcccctatggaaaagattggtatttgtggtagaactggtgccggtaaatcttctattatgactgccttgtataggatctccgaattggattcaggttccatcagaattgatgacgttgatattgccactatcggcttgaaagatttgagatcccatttgtccatcattccacaagatccagttttgttcaacggcactatcagatctaatttggatccatttggtgaacaaccagacgacgttttgtgggaatctttaagaagatcaggtatcttgaccaccgaagaagttgctaaagctagagctatttccaaggattctattactgctgcttctggtggtaaagaaggttcagaagttgaatcacaagaagtcgaattgccaaagttccacttgtatcaacctgttgaagatgaaggtgagaatttctcattgggtgaaagacagttgatctcttttgctagagctttggtcagaaacgccaagatcattatattggatgaagccacctcttccgttgattatggtactgatgacaaaatccaaaccactatcgcacaagaattcaagtcctgtaccattttgtgcattgcccacagattgaaaacgatcatcaactacgataagatcctggttatggataagggttccgttagagaatttgatactccatggaacctattcaactcaaacggttctgttttcagggaaatgtgcgaaaagtctaacatagttgctgaggactttaagaggcgttga

SEQ ID NO: 970 - protein, 1489 aa, Candida theae
MDDSSLEIGNDLYKPQKRILTFLFRNKFYPIPKDDSERKIYPEQSSNILYRVFFWWVSPLMTIGYTRTLQPDDLWILTEDMKVEHFYNYFVTYLQVETERAHLAHIANKCKERNESVEDSSKSREEDLQDFVLSPMNIATVLFLTFKRQILVGLILAIFSLSGIACSPLLTKELIKFVEKRSLGVHTNIGQGIGYSLGVVFMMLFSNLLFNHFMYIGQSMGALIKALLTKAVLNKAFKFNAESRHKFPQSKLTSIITTDLSRVEIAVMFQPLLLCLPIPIAIAIVILVVNIRVSAVIGIVIFIIFLGFISIGAKKLFAYRDAVSKITDKRVNFMKEILNNLKMIKFYSWEHPYHENVCRVRGEEVDMILKIQTLRNVIFSLAMTLTGICSMIAFVILYAIQGSTSSPAKMFSSVSTFEILGLMVFFIPQALSTTADMINGFKRIGAVLSADEEEPYEGYRELNDASDKRAIALKDASFSWDVFDDEEGEEDEADGDGDGDEEEEIEDKKDKKKAKKEKKRKEKGKDTKSSFPSTSSNDIELSTIPKTSPNSKANNKGEQEEATSFPGLKNIDLTIHKGEFIVITGLVGSGKSSLLSAIAGFMSCDSGEVDINGPLLLCGAPWIQNNTIRENIVFGKPFDQEYYDKVIYACALNIDLDSLEGGDYTEVGEKGITLSGGQKARINLARAVYANKEIILMDDVLSAVDARVGKHILNNCFLGLLGSKTRVLATHQLSLIGSADRIVFLNGDGSIDVGKMDELIARNNDFNQLMKFSKLEDIEEENLDVEVEEIVDEIDLGNKESKDSGEIVSVFSQNQSGIDTSQELTRRRTRIFSKSDSDNNDSMEDNDVEYKDYNHNKDATKGKIITEEERAVNSIKFDVYHKYLKYGAGKLTPWGFFTIFAVLLTLATFCDIFTNTWLSFWIEQKFDGKSNGFYIGFYVMFNVLWVIFLTYTFVFFIHGTTVSSKHLNLMAIKRILHAPMSFMDTTPMGRILNRFTKDTDALDNEISDNLRLFFTAIAKMIGVFILIIIYLPWFACAIPGIFVLFFLIANFYQASNREVKRLEAILRSFVYNNVNEVLSGMNTIKAYKDESRFADLGDLLLNKANEASFVVNANQKWLGIQLDLLAELIVLIVSLLCVNRVFSINAAAVGLLMTYTLQVANELLNLVRTFTLVENDMNSAERIIHYALKVEQEAPYKIDSSQPPPDWPQYGAVDFKNVNMKYRPGLPLVLKDFSLKIAPMEKIGICGRTGAGKSSIMTALYRISELDSGSIRIDDVDIATIGLKDLRSHLSIIPQDPVLFNGTIRSNLDPFGEQPDDVLWESLRRSGILTTEEVAKARAISKDSITAASGGKEGSEVESQEVELPKFHLYQPVEDEGENFSLGERQLISFARALVRNAKIIILDEATSSVDYGTDDKIQTTIAQEFKSCTILCIAHRLKTIINYDKILVMDKGSVREFDTPWNLFNSNGSVFREMCEKSNIVAEDFKRR

SEQ ID NO: 971 - DNA, 4449 bp, Lachancea quebecensis
  source 1..4449: mol_type = other DNA
atgtccaccacctccatcatttctgaaaagggtcataactctagagactccggtgttgaaaacgatattagagatttggctagagctttcactaacgcctcttctattacttatccaatgactggtggtgacacctcttcattgaattctaaagctccagttaacccagtcttgaccaattacgaatccgatgattacatcccaaagttggacccaaattccgatgaattctcatccattgaatgggtcagaaacctgtccaagttgattttgaatgctccagaacattacaagccatacactttgggttgtacttggaagaatttgagagcttttggttcctctgctgatgttgcttatcaatctactgttgccaacattccaaagaagttgtgcgaattcttctacagaaagtgccataaggctaacgaggataacaacatcgatatcttgaaacctatggacggtttgattgaaccaggtgaattattggttgttttgggtagaccaggttctggttgtactactttgttgaagtccatttcctctaacactcacggtttcaagttggactctaactctatcgttgaatacgatggtatttccccagaagagatcaaaaagcactatagaggtgaagttgtttacaacgctgaagccgatgttcattttccacatttgactgttttcgaaaccttgaacaccattgctttgttgtctactccatccaatagaatcccaggtgtttctagaactgcttttgctaaacatttgaccgaagttgttatggctacttacggtttgttgcataccagaaacactaaggttggtaacgaattggttagaggtgtttcaggtggtgaaagaaagagagtttctattgccgaagtttccatttgcggttctaaattgcaatgttgggataacgctactagaggtttggattctgctactgctatggaatttgttaaggctttgagaacctctgccagaatgatgaagtcatcttctgctgttgctatctaccaatgttctcaagaaacctacaacttgttcgataaggtttgcgtcttgtacgaaggtagacaaatctatttcggttctgctaacgaagccaagcaatactttgaagagttgggttacatttgcccagaaagacaaactaccgctgatttcattactgctgttacttctccaggtgaaaggattgcaaacgaaaacaagaagttcgttccatccactgctgaagaaatggaaaaacattggaagaactccgaacagtacagacacttgttgtccaaaattgaaaagagacagaacgaggacaactccggtaaaaagactgatttgagaaaaggtcatgtcgccagacaatctcatagagctagagcatcttctccattcatcgtttcttattggctgcaggttaagtacttgttggaaagaaacttccagaggatcagaaactctattggtttgaccttgttcttggtcttgggtaactcttctatgtctttgttgttgggctctatgttctacaaggttttgaagcacgataatactgctggcttgtattctagagctgctgctttgtttttcgccgttttgtttaatgctttcagctgcatgttggaagttttggccttgtatgaatccagaccaatcattgaaaagcacaagaggtacagcttgtatcatccttcagctgatgctttggcctctattattagtgaaatcccatctaagttggtcaccgctgttttctttaacatcgtgttctactttctgtgcaacttcaaaactgatgctggtgctttcttcttctacttcatgatgtctttgattgccaccttcgttatgtcccatattttcagatgtattggttccgctactaagactttggctcaagctatggttccaggttcagttttgttgttagctatgtctatctacaccggtttcgctatcccaaagactaagattttgagatggtctaagtggatctggtacattaacccattggcctacattttcgaatccatgatggttaacgaattccacgatcataacttcgaatgctctgagtatattccaagaggtccaggttaccataacatctctggtactgaaagagtctgttcttctattggtgctaagcctggtgaaaattttgttgatggtgagttgtacatcaacgcctcatatggttattatcatggtcacaaatggcgtggtttcggtattggtttagcttacgctattttcttcttgggcctgtacttggttattaccgaattcaacgaatccgctaagcaaaagggtgaaatcttggtttttagacagtccaccttgaagaacaacactaagaaaaccaggtacatctccgatttggaatctggtggtggtgctgcttctacatcagaaaagaatttggttgatgactctggtgataacggtttgggttccattagacagatcgaattgtctaagtccgaagccatttttcattggagaaacgtttgttacgatgtcgttgtcaaaggtgaaactaagagaatcttgaacggtattgatggttgggttaagccaggtactttgactgctttgatgggtgcttctggtgctggtaaaactactttattggattgcttagcttccagagttacctctggtgttattactggtgatatcttcgttaacggtcacttgagagattcttcattcgctagatcaattggttactgtcaacaacaagacttgcatttggaaactgctaccgttagagaatccttgagatttgctgcttatttgagacagccaagatccgttagtatcgaatctaagaacagatacgtcgagtccgttatcaacatcttggaaatgaagcaatacgctgatgctatcgttggtgttagtggtgaaggtttgaatgtcgaacagagaaaaagattgaccatcggtgtagaattggctgctaaacctaagttgttggtctttttggatgaacctacttctggtttggatagtcaaactgcttggtctatttgccagttgatgagaaaattggctgatcacggtcaagctgttttgtgtactattcaccaaccttccgctttgctgttgcaagaattcgataggttgttgttcctacaaagaggtggtcaaacagtttactttggtgatttgggtgaaagatgccaaaccatgattaggtacttcgaaaagaatggtgctcatcaatgtccaaaggatgttaatccagcagaatggatgttagaagttattggtgcagctccaggttctcatgctgatcaagattaccatgaagtttggaagggttctgaagaatgtactgctactcaagctgaattggaatggatggaaaaagaattgggtaagaagccacaagacaacttggaaagaggtgaatttgcttcctcactgttgtcccaatactttttggttactaagaggctgttccaacagtattggagaacaccatcttacttgtggtctaaggctatcttgactttgttctcccaaatcttcatcggtttcactttctttaaggccgacagatcattgcaaggtctgcaaaatcaaatgctgtccgttttcatgttcaccgttgtttttaatcctgccgtgcaacaatatttgccaacctatatttctcagagggacttatacgaagctagagaaagaccatctaagaccttttcatggattgccttcattttgtcccaaattaccgttgaaattccttggaacttcgccattggtacattgggtttcttgtgttactattacccagtctctttctaccgtaatgcttcttttgccaatcaattgcatgagagaggtgctttgttctggttattctgtacagctttctacgttttcactggttctatggctcaattgtgtgttgctggtcaagaagttgctcaatctgctggtcatattgctagcttgttgtttgtcttgtccttgtctttttgcggtgttatggttgctccaaagaatatgccaggtttttggaagttcatgtacagagtttctccactgacttacttcatcgatggtgttttgtctactggtattgccaactctaaggttgaatgttccgattacgaatttgtcactttcactccaagatctggtcaaacttgtggtgagtatatgtccttgtatattgatgctgctggtactggttacatgaaggattctgattctaccaccaagtgttctttttgtccagcttcttccactaacgtgttcttgaaaatggtgtcctctaattactctcacagatggcgtaactacggtatctttttgtgctacatttgcttcaacgttttcgctgcagttttcttgtactggttggcaagagttcctaaaagaaaggctatggttaccgataagagaaagccaactgctaagaagtga

SEQ ID NO: 972 - protein, 1482 aa, Lachancea quebecensis
MSTTSIISEKGHNSRDSGVENDIRDLARAFTNASSITYPMTGGDTSSLNSKAPVNPVLTNYESDDYIPKLDPNSDEFSSIEWVRNLSKLILNAPEHYKPYTLGCTWKNLRAFGSSADVAYQSTVANIPKKLCEFFYRKCHKANEDNNIDILKPMDGLIEPGELLVVLGRPGSGCTTLLKSISSNTHGFKLDSNSIVEYDGISPEEIKKHYRGEVVYNAEADVHFPHLTVFETLNTIALLSTPSNRIPGVSRTAFAKHLTEVVMATYGLLHTRNTKVGNELVRGVSGGERKRVSIAEVSICGSKLQCWDNATRGLDSATAMEFVKALRTSARMMKSSSAVAIYQCSQETYNLFDKVCVLYEGRQIYFGSANEAKQYFEELGYICPERQTTADFITAVTSPGERIANENKKFVPSTAEEMEKHWKNSEQYRHLLSKIEKRQNEDNSGKKTDLRKGHVARQSHRARASSPFIVSYWLQVKYLLERNFQRIRNSIGLTLFLVLGNSSMSLLLGSMFYKVLKHDNTAGLYSRAAALFFAVLFNAFSCMLEVLALYESRPIIEKHKRYSLYHPSADALASIISEIPSKLVTAVFFNIVFYFLCNFKTDAGAFFFYFMMSLIATFVMSHIFRCIGSATKTLAQAMVPGSVLLLAMSIYTGFAIPKTKILRWSKWIWYINPLAYIFESMMVNEFHDHNFECSEYIPRGPGYHNISGTERVCSSIGAKPGENFVDGELYINASYGYYHGHKWRGFGIGLAYAIFFLGLYLVITEFNESAKQKGEILVFRQSTLKNNTKKTRYISDLESGGGAASTSEKNLVDDSGDNGLGSIRQIELSKSEAIFHWRNVCYDVVVKGETKRILNGIDGWVKPGTLTALMGASGAGKTTLLDCLASRVTSGVITGDIFVNGHLRDSSFARSIGYCQQQDLHLETATVRESLRFAAYLRQPRSVSIESKNRYVESVINILEMKQYADAIVGVSGEGLNVEQRKRLTIGVELAAKPKLLVFLDEPTSGLDSQTAWSICQLMRKLADHGQAVLCTIHQPSALLLQEFDRLLFLQRGGQTVYFGDLGERCQTMIRYFEKNGAHQCPKDVNPAEWMLEVIGAAPGSHADQDYHEVWKGSEECTATQAELEWMEKELGKKPQDNLERGEFASSLLSQYFLVTKRLFQQYWRTPSYLWSKAILTLFSQIFIGFTFFKADRSLQGLQNQMLSVFMFTVVFNPAVQQYLPTYISQRDLYEARERPSKTFSWIAFILSQITVEIPWNFAIGTLGFLCYYYPVSFYRNASFANQLHERGALFWLFCTAFYVFTGSMAQLCVAGQEVAQSAGHIASLLFVLSLSFCGVMVAPKNMPGFWKFMYRVSPLTYFIDGVLSTGIANSKVECSDYEFVTFTPRSGQTCGEYMSLYIDAAGTGYMKDSDSTTKCSFCPASSTNVFLKMVSSNYSHRWRNYGIFLCYICFNVFAAVFLYWLARVPKRKAMVTDKRKPTAKK

SEQ ID NO: 973 - DNA, 4389 bp, Zygosaccharomyces rouxii
  source 1..4389: mol_type = other DNA
atggaattcgagccaaagtccgaaggttctttgccatcttatgaaggtttggataagtccgctgaagttcaagttcaaagattggctcatggtgttaacccaattcatgaaggtgctccacaattggatcctaactcttctgatttttcatccaaagcctggattcagaatatggccaatttgtcatctgaagatccagatcatttcaagccataccaagttggttgttgttggaaagatttggctgcttctggtgcttctgctgatgttgcttatcaaactactgttgaaaacttgccatggaaggttttgttctggatctatagaaaattgaggcccaccagaaagtccgatattttccaaattttgaagccaatggatggtgctttggatccaggtgaagttttggttgttttaggtagaccaggttctggttgtactactttgttgaagtctattgcctctaacacccacggttttaacattgctaaggattccaccatttcctactctggtttgtctccaaaggatatcaacagacattttagaggtgaagtcgtttacaacgccgaaaccgatattcatttgccacatttgactgtctaccaaaccttgttgactgtgtctagattgaaaactccacagaacagaatcaagggtgttgatagagaaacttgggctagacatatgaccgatgttgttatggctacttatggtttgtcccataccaaaaacacaaaggttggtggtgatttggttagaggtgtttcaggtggtgaaagaaagagagtttctattgccgaagttaccatttgcggttctaagtttcaatgttgggataacgctaccagaggtttagatgctgctactgctttggaattcattaaggctttgagaacccaagctgatattttggcttctactgcttgtattgctatctaccaatgttcccaaaacgcctacgatttgttcgataaggtttgtgtcttgtactccggttaccaaattttctttggttctgctggtgatgccaagagatactttgaagaaatgggttaccattgtccatccagacaaactacagctgatttcttgacttctgttacttctccagctgaaagaactgttaacaacgagtacattgaaaagggtatccacgttccagaaactccagaagaaatgtctgattattggaggaactctcaagagtacagagacttgcaagaacagatccaaaacagattggatcagaaccatgaagaaggtttgagagccatcaaagaatctcataatgctgcccaatctaagaggactagaagatcatctccatacactgtttcttacggtatgcagatcaagtacctgttgattagaaatatgtggcgtatcaagaactcctccggtattaccatttttcaggttttcggtaattccgtcatggccttgttgttaggttctatgttttacaaggtcctgaagccatcttctactgatactttttactatagaggtgccgctatgttcttcgccattttgtttaatgctttcagctccttgttggagatcttctcattatatgaagccagaccaatcaccgaaaagcacagaacttattccttgtatagaccttccgctgatgcttttgcttctgttttgtctgaaattccaccaaagatcgttaccgctatttgttttaatgtcgccttgtacttcttggtccactttagagttgatgctggtagattcttcttctacttcctgattaacatcctggccatcttttccatgtctcatatgtttagatgtgtcggctctttgactaagactttgactgaagctatggttccagcctctatcttgttattggttttgtctatgtacacgggtttcgctattccaaagactaagatgttaggttggtctaagtggatctggtacattaacccattgtcctacttgttcgaagccttgatggttaacgaattccacgacagaaacttctcttgcacttcttttattccaatgggtccaggttaccaatcagtttctggtactcaaagagtttgcgctgcagttggtgctgaaccaggtcaagattatgttttgggtgataactacatcaagcagtcttacggttacgaaaacaaacataagtggcgtgcatttggtgttggaatggcttatgttatctttttcttcttcgtgtacctgttcttgtgcgaagttaatcaaggtgctaagcaaaacggtgagattttggtttttccacaatccgttgtcagaaagatgagaaagcagaagaaaatctctgccggttctaacgattcttctgatcctgaaaagaccatcggtgttaaggttaatgatttgactgatacgacgctgatcaagaattctacagattcatccgccgaacagaaccaggatattggtttgaacaaatccgaagccattttccattggagaaacgtttgttacgatgtccaaatcaagtccgaaaccagaagaattttggataacattgatggttgggtcaagccaggtactttaactgctttgatgggtgctactggtgctggtaaaactactttattggattccttggctcaaagggttactactggtgttttgactggttccattttcgttgacggtaaattgagagatgaatccttcgctagatctatcggttactgtcaacaacaagacttgcatttgactactgctaccgttagagaaagcttgttgttttcagctatgttgagacaacctaagtctgttccagcttctgaaaagaggaaatacgttgaagaagtcatcaacgtcttggagatggaaccttatgctgatgctatagttggtgttgctggtgaaggtttaaacgtcgaacaaagaaaaaggttgaccatcggagttgaattggctgctaaacctaatctgctgttgttcttggatgaacctacaagtggtttggattctcaaactgcttggtctatttgccagttgatgaagaagttggctaatagaggtcaagctattttgtgcaccattcatcaaccatctgccatgttgatccaagaatttgataggttgctgttcctgcaaaaaggtggtcaaactgtttattttggtgacttgggtaaagactgcaagtccatgattcattacttcgaatctcacggttctcataagtgtccatctgatggtaatccagcagaatggatgttggaaattgtcggtgctgctccaggtactcatgctaatcaagattactacgaagtttggcgtaactccgaagaatatcaagaggtcagaaaagaattggacaggatggaagatgaattgaagggtattgatggtggtgacgaaccagaaaaacacagatcttttgctactgacatcttcacccagatcagattggtttcccatagattgctacaacaatattggaggtcaccctcttacttgtttccaaagtttttgctgacagtgttctccgagttgttcatcggttttactttgttcaaggctgacagaagcttgcaaggtctacaaaatcaaatgctgtccgttttcatgtacaccgttgtttttaacaccttgttgcagcaatacttgcccttgtatgttcagcaaagaaacttgtacgaagctagagaaagaccttctagaactttctcttggtttgccttcatcgtgtcccaaatcttcattgaagttccttggaacattttggctggtactgttgctttcttttgttactattacccaatcggcttctacagaaacgcttctgaatctcatcaattgcacgaaagaggtgctttgttttggttattctctaccgcttactacgtctggattggttctatgggtttgttggctaactctttcatcgaacatgatgttgcagctgctaatttggcatctttgtgttatactttggccttgtctttttgcggtgttttggctactccaaaagttatgccaagattctggatattcatgtaccgtgtttctcccttgacctacttcattgatgctactttagctaccggtattgctaacgttgatgttaagtgtgctgattacgaattcgctaagttcactccaccaaaaggtcaaaattgtggtgactacatgaagaacttcattaagtctgctggtacgggttacttgaaagattcttcagctgttgacgaatgcaacttctgccaattctctactactaatgcctacttggaatccgttacctcttcatactctagacgttggagaaattacggtatcttcatttgcttcattgccttcgattatattgccgccgttttcttatattggttggctagagttccaaagaagtccggtaaagtttcaggtaagaagtaa

SEQ ID NO: 974 - protein, 1462 aa, Zygosaccharomyces rouxii
MEFEPKSEGSLPSYEGLDKSAEVQVQRLAHGVNPIHEGAPQLDPNSSDFSSKAWIQNMANLSSEDPDHFKPYQVGCCWKDLAASGASADVAYQTTVENLPWKVLFWIYRKLRPTRKSDIFQILKPMDGALDPGEVLVVLGRPGSGCTTLLKSIASNTHGFNIAKDSTISYSGLSPKDINRHFRGEVVYNAETDIHLPHLTVYQTLLTVSRLKTPQNRIKGVDRETWARHMTDVVMATYGLSHTKNTKVGGDLVRGVSGGERKRVSIAEVTICGSKFQCWDNATRGLDAATALEFIKALRTQADILASTACIAIYQCSQNAYDLFDKVCVLYSGYQIFFGSAGDAKRYFEEMGYHCPSRQTTADFLTSVTSPAERTVNNEYIEKGIHVPETPEEMSDYWRNSQEYRDLQEQIQNRLDQNHEEGLRAIKESHNAAQSKRTRRSSPYTVSYGMQIKYLLIRNMWRIKNSSGITIFQVFGNSVMALLLGSMFYKVLKPSSTDTFYYRGAAMFFAILFNAFSSLLEIFSLYEARPITEKHRTYSLYRPSADAFASVLSEIPPKIVTAICFNVALYFLVHFRVDAGRFFFYFLINILAIFSMSHMFRCVGSLTKTLTEAMVPASILLLVLSMYTGFAIPKTKMLGWSKWIWYINPLSYLFEALMVNEFHDRNFSCTSFIPMGPGYQSVSGTQRVCAAVGAEPGQDYVLGDNYIKQSYGYENKHKWRAFGVGMAYVIFFFFVYLFLCEVNQGAKQNGEILVFPQSVVRKMRKQKKISAGSNDSSDPEKTIGVKVNDLTDTTLIKNSTDSSAEQNQDIGLNKSEAIFHWRNVCYDVQIKSETRRILDNIDGWVKPGTLTALMGATGAGKTTLLDSLAQRVTTGVLTGSIFVDGKLRDESFARSIGYCQQQDLHLTTATVRESLLFSAMLRQPKSVPASEKRKYVEEVINVLEMEPYADAIVGVAGEGLNVEQRKRLTIGVELAAKPNLLLFLDEPTSGLDSQTAWSICQLMKKLANRGQAILCTIHQPSAMLIQEFDRLLFLQKGGQTVYFGDLGKDCKSMIHYFESHGSHKCPSDGNPAEWMLEIVGAAPGTHANQDYYEVWRNSEEYQEVRKELDRMEDELKGIDGGDEPEKHRSFATDIFTQIRLVSHRLLQQYWRSPSYLFPKFLLTVFSELFIGFTLFKADRSLQGLQNQMLSVFMYTVVFNTLLQQYLPLYVQQRNLYEARERPSRTFSWFAFIVSQIFIEVPWNILAGTVAFFCYYYPIGFYRNASESHQLHERGALFWLFSTAYYVWIGSMGLLANSFIEHDVAAANLASLCYTLALSFCGVLATPKVMPRFWIFMYRVSPLTYFIDATLATGIANVDVKCADYEFAKFTPPKGQNCGDYMKNFIKSAGTGYLKDSSAVDECNFCQFSTTNAYLESVTSSYSRRWRNYGIFICFIAFDYIAAVFLYWLARVPKKSGKVSGKK

SEQ ID NO: 975 - DNA, 4647 bp, Cyberlindnera fabianii
  source 1..4647: mol_type = other DNA
atgtccaactccgcctacgatattgaagatcatcctgaagaggttaacaagtacgatggttacaacaacgctgttgattccgaagttcaaagattggctagacaaatcacccaaaactcccaattgtcttttcaagatgacggttttaagttggctccaggtgaatctaatatcgacggtttgtctagagtttctactattgctcctggtgttaacccaatgcaaaacgttgaagaattggacccaagattggatcctaactctgaagaattccaatccagatactggatcaagaacttcaaggctttgatggataaggatccagatcactacaagaactactcattgggtgttaccttcaagaatttgagagcttctggtgaagcttctgatgctgattatcaaaccaccattattaacgccccattcaagattgctaagcaatatgctaaagccgtgttctctactagatctgctaaacaagctaacaggttcgacatcttgaagtctttggatggtatagttagaccaggtgaagttttggttgttttgggtagacctggttctggttgtactacttacttgaaatccattgcctctaacacccatggttttaagataggtcaagagtccgaaatgtcttacgaaggtttgacccaaaaagagatcaaaaagcactttagaggtgaggttgtttacaacgccgaatccgatattcatttcccacatttgactgtttggcaaactttgactactgctgctaaattcagaaccccagaaaacagaattccaggtatctcaagagaagattacgctaacgctttgaccgaagtttttatggctacttatggtttgtcccataccaagaataccaaggttggttcagaattggttagaggtgtttctggtggtgaaagaaagagagtttcaattgccgaagtttctttagctggtgctagattgcaatgttgggataatgctactagaggtttggatgctgctactgctttggaattcattagagctttaagaacctccgctgatgttttggatacaactgctttgattgctatctaccaatgttcccaagaagcctacgatttgttcgataaggtttctgtcttgtacgagggttaccaaattttctttggtagagctgataaggccaaagaatacttcattaacatgggttgggaatgcccaccaagacaaactacagctgatttcttgacttctgttacctctccaagagaaagagttccaagagctggttttgaaaagaaggttccaagaactccatctgaatttgctacttattggaaagcttctccagagtacaaggcattgattgccgaaattgatgaatccttggctgccaatcaaaagtccgaattgaaggatttgatctacgatgctaaggcctccagacaatctaaaagaatgagaaagactgacccctacaccgtttctatttcattgcaaactaagtacctgttggagagagaagtctacaggattaagaacaactttggtttccatggcttctccgctattgctaattctttgatggctttggttttggcctccatcttttacaacatgtctaagactaccgagtccttctattctagaggtgctgctatgtttttcgcttgtttgtttaacggtttccagtccttcttggagatcttgtctttgtttgaagccagaccaattatcgaaaagcacaaacaatacgccttgtatcatccagctgctgaagctttggcttctgttatttctcaattgccttttaaggccttctcctccttgatgtttaacctgatctattacttcatggtcaacttcagaagagatccaggtagattcttcttctacttgttggctaacgttacttctaccttcaccatgtctcatttcttcagattgatcggctctatgtcatctactttgccacaagctttggttccaggtcatatagttttgttgggtttgtccatgttcgtcggttttactattccagtcaactacatgttaggttggtgcagatggattaactacattaacccattggcttacgctttcgaagctttaatggctaacgaattccatggtttgagatacgcttgttctgcatttttgccagataacccagataatcatccagattggccagctaaatcttggatctgtaatgctgttggtgctgttgccggtgaagctactgtttcaggtgatgcttacttagatgctgcttactcctactctaattctcataagtggcgtaactgggctattacttttgccttctgtattttcttcttggccacctacatgattttcgctgagtataatgaatccgccaagcaaaagggtgaaatcttgttgtttcaaaggtccaccttgaagaagttgaagaaagaacataaggctgccaagaacgatatcgaaggtggtaaattgagagacatcaccgaacaagatcacgacgaagaatctgaacaacacgttgatgctattcaagccggtaaggatattttccattggagagatgttcattacaccgtcaagattaagtccgagtacagggaaattttgtctggtgttgatggttgggttaagccaggtactttgactgccttgatgggtgcttcaggtgctggtaaaactactttgttggatgtcttggctaacagagttactatgggtatcgttactggtaacatgttcgttaacggtagattgagggattcctcattccaaagatctactggttacgttcaacaacaggacttgcatttgccaactgctactgttagagaagccttgagattttctgcttacttgagacaaccagctgaagtctctaaagctgaaaaggatgactatgtcgaagaggtcattaagatcttggacatgcaaaagtatgctgatgctgttgttggagttgctggtgagggtttgaatgttgaacaaagaaaaagattgaccatcggtgttgaattggctgctaagcctaagttgttgttgtttttcgatgaacctacctccggtttggattctcaaactgcttggtctatttgccagttgatgagaaagttggctaatcacggtcaagctattttgtgcactattcatcaaccatccgccatcttgatgcaagaattcgatagattgctgttcttagccaaaggtggtagaactgtttactttggtgacttaggtgaaggttgccaaaccttgattgattactttgaaaagtacggtgctccaaagtgtcctcctgaagctaatccagctgaatggatgttgcatgttattggtgctgctccaggttctcatgctaatcaagattatcatcaagtctggttggattccgctgaaagaagagatgtattgtctgaattggacaggatggaaaaagagttggttaacattccagttgacgattccgtttctcactcagaatttgctgcaccattttgggttcaattgactgttgttactgccagagtgttccaacaattttggagaacaccatcttacatttgggccaagatgtttttgtccgtcgtttcctctttgtttatcggctttatcttcttcaggtcgaagaactctatccaaggcttgcaaaatcaaatgttcgccttgttcatgttcctgaccatttttaacccactgctgcaacaaattttgcccacttttgtttctcagagggacttgtacgaaactagagaaagaccagctaagaccttttcatggaaggctttcattatcgctcaattcatagctgaagctccatggaatgcttttgttggtacagttggtttcttctgcttttattacccagctggtttctacagaaatgccgaaccatatgatgaagtcaatggtagaggtgcatatggttggttctttgctgttttgttcttcatctacattggttctatggcccatatgttgattgcccctttacaaattgctgattctgctggtaatttgggctctttgttgttcactatgtgtttgactttctgcggtgttttggttactaaggatgctttgccaggtttttgggttttcatgtatagagtctctccattcacctacttcatcgaaggttatttgactaatgctttggcccataacaagatcgtctgttcagaagaagagttcagagttttgtctccaccagatggtttgacttgccaagattatttgggtgactacatttctaaagccggtacaggttacttgcaagatccagaagcaactggttcttgtcaattttgtccaatgtctaaaacggacgacttcttggctcaagttcaattggattatggtaacagatggcgtgatgtcggtattttcattgccttcattttcatcaacttgttcttcgccgtcctgttttattggttggctagagttcctaagaagtccgatagagttagtactgaacaacctgaaggtgctgttaatatgggtgctgaattagaaaagaaagccgccttgcatagaactgctacaaatgctgcttcacaagctgcttctcaaggttatgctccacaagtctataacgaaaaagtcggttctgaagaaggctccttggataaggttgataactctgattcttccaggtaa

SEQ ID NO: 976 - protein, 1548 aa, Cyberlindnera fabianii
MSNSAYDIEDHPEEVNKYDGYNNAVDSEVQRLARQITQNSQLSFQDDGFKLAPGESNIDGLSRVSTIAPGVNPMQNVEELDPRLDPNSEEFQSRYWIKNFKALMDKDPDHYKNYSLGVTFKNLRASGEASDADYQTTIINAPFKIAKQYAKAVFSTRSAKQANRFDILKSLDGIVRPGEVLVVLGRPGSGCTTYLKSIASNTHGFKIGQESEMSYEGLTQKEIKKHFRGEVVYNAESDIHFPHLTVWQTLTTAAKFRTPENRIPGISREDYANALTEVFMATYGLSHTKNTKVGSELVRGVSGGERKRVSIAEVSLAGARLQCWDNATRGLDAATALEFIRALRTSADVLDTTALIAIYQCSQEAYDLFDKVSVLYEGYQIFFGRADKAKEYFINMGWECPPRQTTADFLTSVTSPRERVPRAGFEKKVPRTPSEFATYWKASPEYKALIAEIDESLAANQKSELKDLIYDAKASRQSKRMRKTDPYTVSISLQTKYLLEREVYRIKNNFGFHGFSAIANSLMALVLASIFYNMSKTTESFYSRGAAMFFACLFNGFQSFLEILSLFEARPIIEKHKQYALYHPAAEALASVISQLPFKAFSSLMFNLIYYFMVNFRRDPGRFFFYLLANVTSTFTMSHFFRLIGSMSSTLPQALVPGHIVLLGLSMFVGFTIPVNYMLGWCRWINYINPLAYAFEALMANEFHGLRYACSAFLPDNPDNHPDWPAKSWICNAVGAVAGEATVSGDAYLDAAYSYSNSHKWRNWAITFAFCIFFLATYMIFAEYNESAKQKGEILLFQRSTLKKLKKEHKAAKNDIEGGKLRDITEQDHDEESEQHVDAIQAGKDIFHWRDVHYTVKIKSEYREILSGVDGWVKPGTLTALMGASGAGKTTLLDVLANRVTMGIVTGNMFVNGRLRDSSFQRSTGYVQQQDLHLPTATVREALRFSAYLRQPAEVSKAEKDDYVEEVIKILDMQKYADAVVGVAGEGLNVEQRKRLTIGVELAAKPKLLLFFDEPTSGLDSQTAWSICQLMRKLANHGQAILCTIHQPSAILMQEFDRLLFLAKGGRTVYFGDLGEGCQTLIDYFEKYGAPKCPPEANPAEWMLHVIGAAPGSHANQDYHQVWLDSAERRDVLSELDRMEKELVNIPVDDSVSHSEFAAPFWVQLTVVTARVFQQFWRTPSYIWAKMFLSVVSSLFIGFIFFRSKNSIQGLQNQMFALFMFLTIFNPLLQQILPTFVSQRDLYETRERPAKTFSWKAFIIAQFIAEAPWNAFVGTVGFFCFYYPAGFYRNAEPYDEVNGRGAYGWFFAVLFFIYIGSMAHMLIAPLQIADSAGNLGSLLFTMCLTFCGVLVTKDALPGFWVFMYRVSPFTYFIEGYLTNALAHNKIVCSEEEFRVLSPPDGLTCQDYLGDYISKAGTGYLQDPEATGSCQFCPMSKTDDFLAQVQLDYGNRWRDVGIFIAFIFINLFFAVLFYWLARVPKKSDRVSTEQPEGAVNMGAELEKKAALHRTATNAASQAASQGYAPQVYNEKVGSEEGSLDKVDNSDSSR

SEQ ID NO: 977 - DNA, 4515 bp, Wickerhamomyces anomalus
  source 1..4515: mol_type = other DNA
atgtccttgaacaacaccccaaaccatcaccaagatgattctgatcattcagttccagatgttccagaagagtacaagggtttcgatcaaaacgttgatgttcacattcaaaacttggccagacaaattaccaatgcttctcaagctaacacctccttgtctagagtttcttctattgctccaggtgttgttgctattaacaacccagatgttgatccaagattggacccaaattctgacaacttcgaatctagatactggatcaagaacttcaagaacctgatggataaggatccagatcattacgctaactactcattgggtatcgtctacaagaatttgagagcttttggtgaagctaccgatgctgattatcaaactactgttttgaacatgccattgaagtacgctggtaaagctttgaaatacgccttgtcatctagatctgctaagaaggctaagcaattcgatatcttgaaacctatggacgccttgattaagccaggtgaagttgttgttgttttgggtagaccaggttctggttgttctactttgttgaaaaccattgcctctaacacccatggtttccatattggtgaagaatccgaaatctcttacgaaggtttgacccaaaaggatatcaagagacattataggggtgaagttatctacaacgccgaaaccgatattcatttcccacatttgactgtttggcagactttgtctttggctgctaaattcagaactccacaaaacagaattccaggcatctcaagagaagattacgccaatcatttgaccgaagtttacatggctacttacggtttgtctcataccaagaataccaaggttggtaacgaaaacgttagaggtgtttctggtggtgaaagaaagagagtttcaattgccgaagtttctttgtctggtgctagattgcaatgttgggataatgctactagaggtttggatgctgctactgctttggaattcattagagctttgagaacccaagccgatattttggatacaactgctttcgttgctatctaccagtgttctcaagatgcttacgatttgttcgataaggtgtctgtcttgtatgaaggttaccaaatctacttcggtagagctgatgaagctaaggattactttgttagaatgggttaccattgtccagctagacaaactacagctgattacttgacttctatcacctctccaagagaaagagttgcttctaagggttttgaaaacaaggttccaaagacgccaaaagagtttgaaacttactggaaagcttctcctgaatacgctaagttggttcaagaaattgatgccaccttgcaaaaccacgatgataattctaaggccattatcaagtccgctcacaatcaaaagcaagctaaacatatgagacacacctcaccatacactgtttcattttggatgcaagtcagatacttgttgaccagagatttccagagaatcagaaacgatttgggcttcaacttgtttcaagtttgggctaattctctgatggccttgattttgtcctccatcttttacaacatgcagtctaacactggcagcttttattacagaggtgctgctatgtttttcgccgttttgtttaatggcttctcgtccttcttggaaatcatgactttgtttgaagccaggccaattatcgaaaagcacaagcaatactcgttgtaccatccatctgctaacgctttatcttccgtttttagtcaagtcccttctaagatggttacctctgttgcttttaacttggtcttttacttcatggtcaacttcagaagaaacccaggtagattcttcttctactacttgatgaacttgaccgctaccttttccatgtctcatttctttagattggttggttctgctgcttcttcattgccagaagctttggttccagctcatattatcttgttggctttgactattttcaccggtttcgttatcccagtcaactatatgttaggttggtccagatggatcaactacttggatccattggcttatgctttcgaagctttgatggcaaatgaattcgctggtagagaattcgaatgctcccaattcattccaggtgatcctagaactactccaggtattccagatgatggtttcatttgctctgttgtctcttctgttccaggttcttttgttgttgatggttctaggtacttggaggtcaattacaagtacaagaactctcataagtggcgtaactggggtattactttggctttcactctgtttttcttgttcgtctacttggtgttctctgagtacaatgaatctgctatgcaaaagggtgaagtcctgttgtttcaaagatctaccttgcgtaagttgaaaaagcagcatggtgatattaagaacgacttggaagctggttctgaaagagatgttactgaacaagatgaagaagaaggcgaacaaaacgtagacgttattcatgctggtactgatatcttccattggagagatgttcactactccgtcaagattaagaaagaaaccagggaaatcttgaacggtgttgacggttgggttaagcctggtactttgactgctttaatgggtgcttctggtgctggtaaaactaccttgttggatgttttggctaacagagttactatgggtgttgtcactggtaacatgtttgttaacggtcacttgagagacaactcattccaaagatcaactggttacgtccaacaacaagacttgcatttgaaaactgctactgttagagaagccttgcaattctctgctgatttgagacaacctaaagaagtctctaaggctgaaaaagatgcctacgttgaagaagtcattaagatcctggatatggaaaagtacgcagatgctgttgttggtgttgctggtgaaggtttaaatgtcgagcaaagaaaaagattgaccatcggtgttgaattagctgctaaacctaagctgttgctgtttttggatgaacctacttctggtttggattctcaaactgcttggtctatttgccagttgatgagaaagttggctaaccatggtcaagctattttgtgcactattcatcaaccatccgctatcttgatgcaagaattcgatagattgctgttcttggctaaaggtggtagaactgtttactttggtgatttgggtgaaaactgtcagtccttgattgactacttcgaaaagtatggtgctccaaaatgtccaccacaagctaatccagctgaatggatgttgcatgttattggtgctgcaccaggttcacatgctaatcaagattatcaccaagtctggttggaatcctctgaaagacaagatgtattgaacgaattggacaggttggaaaccgaattggttaagttgccaagagatgactctatcggtcaagaagaatttgctgctccattgtggaaacaatacttgattgtcaccaagagaatcttgcaacagcattggagatcaccagtttacatttggtctaagttgttcctagccgtgtcctcttctttgtttattggttttgctttcttcaaggctaagaacactcaacagggattgcaaaatcaaatgttcggcatcttcatgtacctgatcattttcaacccattggtccaacaaactttgccagcttttgttgaacaaagagccttgtacgaaactagagaaagaccatctaagaccttttcatggaaggcttttattgctgcccaaattacctctgaaattccttggaatgctttggttggtactattgcctttctgtgtttttactacccagtcggtttctacaacaatgcctctccaactaatgcagttgataagagaggtgcttacgcttggtttttcaatgttttgttctacgtttacatcggcaccatggctcatttgtgtattgctggtttagaattggctgatgctgctggtaatattgcttcattggcttttaccttgtgtttgaccttttgcggtgttttagttggtccaaaagccttaccaggtttctggatttttatgtacagggctaatccattcacctacttcatagatggtttcttgtctaatgccctggctaacaatagagttcaatgttccactcaagaatacgtccattttaatccaccatctggttatacttgtggtcagtacatgcaatcctacatcgaaaaagctggtacaggttatttgtctgatccagatgctactactgattgcaatttctgtgctatgtctactaccaacgccttcttgaaattcgtttccttggattattctaggcgttggagaaacgttggtattttcattgccttcattttcatcaacattatcggcgccacattctttttctggttggctcgtgttcctaaaaaggctgatagagttaagggtcaagccaaagaaagatgtgctgaaagagctgctcaaaaacaagagactaactccttcaacgagaaagaggaatcttctaccaactaa

SEQ ID NO: 978 - protein, 1504 aa, Wickerhamomyces anomalus
MSLNNTPNHHQDDSDHSVPDVPEEYKGFDQNVDVHIQNLARQITNASQANTSLSRVSSIAPGVVAINNPDVDPRLDPNSDNFESRYWIKNFKNLMDKDPDHYANYSLGIVYKNLRAFGEATDADYQTTVLNMPLKYAGKALKYALSSRSAKKAKQFDILKPMDALIKPGEVVVVLGRPGSGCSTLLKTIASNTHGFHIGEESEISYEGLTQKDIKRHYRGEVIYNAETDIHFPHLTVWQTLSLAAKFRTPQNRIPGISREDYANHLTEVYMATYGLSHTKNTKVGNENVRGVSGGERKRVSIAEVSLSGARLQCWDNATRGLDAATALEFIRALRTQADILDTTAFVAIYQCSQDAYDLFDKVSVLYEGYQIYFGRADEAKDYFVRMGYHCPARQTTADYLTSITSPRERVASKGFENKVPKTPKEFETYWKASPEYAKLVQEIDATLQNHDDNSKAIIKSAHNQKQAKHMRHTSPYTVSFWMQVRYLLTRDFQRIRNDLGFNLFQVWANSLMALILSSIFYNMQSNTGSFYYRGAAMFFAVLFNGFSSFLEIMTLFEARPIIEKHKQYSLYHPSANALSSVFSQVPSKMVTSVAFNLVFYFMVNFRRNPGRFFFYYLMNLTATFSMSHFFRLVGSAASSLPEALVPAHIILLALTIFTGFVIPVNYMLGWSRWINYLDPLAYAFEALMANEFAGREFECSQFIPGDPRTTPGIPDDGFICSVVSSVPGSFVVDGSRYLEVNYKYKNSHKWRNWGITLAFTLFFLFVYLVFSEYNESAMQKGEVLLFQRSTLRKLKKQHGDIKNDLEAGSERDVTEQDEEEGEQNVDVIHAGTDIFHWRDVHYSVKIKKETREILNGVDGWVKPGTLTALMGASGAGKTTLLDVLANRVTMGVVTGNMFVNGHLRDNSFQRSTGYVQQQDLHLKTATVREALQFSADLRQPKEVSKAEKDAYVEEVIKILDMEKYADAVVGVAGEGLNVEQRKRLTIGVELAAKPKLLLFLDEPTSGLDSQTAWSICQLMRKLANHGQAILCTIHQPSAILMQEFDRLLFLAKGGRTVYFGDLGENCQSLIDYFEKYGAPKCPPQANPAEWMLHVIGAAPGSHANQDYHQVWLESSERQDVLNELDRLETELVKLPRDDSIGQEEFAAPLWKQYLIVTKRILQQHWRSPVYIWSKLFLAVSSSLFIGFAFFKAKNTQQGLQNQMFGIFMYLIIFNPLVQQTLPAFVEQRALYETRERPSKTFSWKAFIAAQITSEIPWNALVGTIAFLCFYYPVGFYNNASPTNAVDKRGAYAWFFNVLFYVYIGTMAHLCIAGLELADAAGNIASLAFTLCLTFCGVLVGPKALPGFWIFMYRANPFTYFIDGFLSNALANNRVQCSTQEYVHFNPPSGYTCGQYMQSYIEKAGTGYLSDPDATTDCNFCAMSTTNAFLKFVSLDYSRRWRNVGIFIAFIFINIIGATFFFWLARVPKKADRVKGQAKERCAERAAQKQETNSFNEKEESSTN

SEQ ID NO: 979 - DNA, 4602 bp, Lachancea nothofagi
  source 1..4602: mol_type = other DNA
atgaaggccaacaagtctaacatggctggtgatccacatggttcttgtgattctgctgttttgactagaaacacctctccagaattgccagaatatgatggtttggattgctctgctagagcttctgttagagaattggctagaactttcactaacggttctgttgcttctaattctaaagctgctgctgttggtgttcatgctactactgctttgccagcttctagaactactactgaatatggtgatgtcaacactacgaacccagttttctcttcttctgaattgccatcctacaactctagattggacccaaattctgacgaattctcttctgctttgtgggtcaagaatttgtcccaattgattgcttctgatccagatcactacaagccatattctttgggttgtacttggaagaacttgagagcttatggtaacgctactgatgttgcttaccaatctacttttgctaacttgccattgcagttgttggaatctggttatagagctgctagaaaagctagaccagaagattccttcgatatcttgaaacctatggatggtatcgttaagccatcagagttgttggttgttttgggtagaccaggttctggttgttctactttgttgaagtctatttccgctaacacccatggtttccatatcgattctgattccgaaatcttctacgatggtatggaccctaaagaaattgctaaacactacagaggtgaagttgtttacaacgccgaatctgatgttcatttcccacatttgactgttttcgacaccttgaaaactgttgctagattgtcttgtccatccaacagattccatggtgttgatagagaaactttcgctacccatattaccgaagttgctatggctacttatggtttgtctcataccagaaacactaaggtcggttcagaattggttagaggtgttagtggtggtgaaagaaagagagtttctattgccgaagtctctatttgcggttctaagtttcaatgttgggataatgctaccagaggtttagattctgctacagccttggaattcattagagctttgagaactactgccaagttgaacaattctgctggtgttattgctatctaccaatgctctcaagatgcctacgatttgttcgataaggtttgtgttttacacgagggttatcagatctattttggtccagctaatgaagccaagcaatactttttggatatgggctatgtttccccagatagacaaactactgctgatttcttgactgctgttactaatccagctgaaaggatcgtcaatcaagaaatggttcaagctggtaaggttgttccatcttctgcatctgaaatggaagctcattggaagcaatctgaaaactacaagagactgatcaacgaaatcgaccattacactactcatgatcaaaccggtaacagagaacaattgagaaacgctcatatcgctaagcaatctaagagagctagacactcttcttcatacactgtctcttacggtttacaggtgaagtacttgttgatcagaaacatgcagaggatcagatcttctatgggtgtcactttgttccaagttattggtaatggtggtatggctttcatcttgggttctatgttctacaagattttgaagcacgataccactgctggtttttattctagagctggtgctttgtttttcgccgttttgtttaatgctttctcgtgcttgttggaaatcttggcattatatgaagccaggccaatttctgaaaagcacaagcgttattccttgtaccatccttctgctgatgctttggcttcagttattagtgaaatcccttctaagttggttacctccgttgtttttaacttggccttgtacttcttgtgcaactttaaacgtgaagctggtgcctttttcttctacttcttgatgactatcgttgccacgtttttgatgtcccatatctttagatgtttgggtgctgctactaagacttacgctgaatctatggtttctgcctctttgttgttgttggctcaagctatctataccggttttgctattccaaagaccaacatcttaggttggtctaagtggatttggtacatcaacccattgtcctacatcttcgaatccttgatggtcaacgaatttcacggtagaaacttttcttgctcccagtatattccagctggttcaggttacgaaattttgtctggtactgaaagagtttgttctgcagttggtgctgttccaggtcaagatttcgtttctggtgaaacctacattaacgttgcttacggttattaccatgctcataagtggcgtggtttaggtattggtttggcttatgctattgtgttcttggctgtttatttggccgttaccgaattcaatgaatctgctaagcaaaggggtgagattttggtttttccacaatccgttatgcgtaggatgaagaaagaacgtaaactgagaaactcctccgattactctggtacagatgttgaaaattcagcaggttctgctccattgaacgagaagaaaatgttggatgaatcctctgtttctgccggttctacttcatcaatgggtgatgctaaattgtccaagtctgaagccatataccattggagaaacgtttgcttcgaagtcaacatcaagaaagaaaccagaaggatcttgaacaacgttgatggttgggttaagccaggtactttgactgctttaatgggtgcttctggtgctggtaaaactactttattggactgtttggcttctagagttaccactggtactattactggtgacatgttcattaacggtttcttgagagatgcttccttcgctagatctattggttactgtcaacaacaagacttgcatttggaatccgctactgtaagagaatctttgagatttgctgcctacttgagacaaccagctactgtttctgaagatgagaagaacaagtacgtggaagatgtcattaagatcttggagatggaaacttacgctaacgctgttgtaggtgttgctggtgaaggtttgaatgttgaacagagaaaaagattgaccatcggtgttgaattggctgctaagcctaagttgttgttattcttggatgaacctacctctggtttggactctcaaactgcttggtctatttgtcagttgatgagaaagttggctaaccatggtcaagctattttgtgcactattcatcaaccatccgctttgttgatgcaagaattcgatagactgttgttcttgcaaagaggtggtcaaactgtttacttcggtgaattaggtaagggttgccataagatgatcgactactttgaatctaatggtgctccaagatgtccagatggtgctaatcctgcagaatggatgttggctgttattggtgctgctcctggtactcatgctaatcaagattatcatgaagtctggcgtaattccccagagtacagagctgttcaagaggaattggaatggatggaacaagaattgcctaagaagccaattgacacctccaatgaacaaactgaatttgccgcttctctgttgtatcagtactacttggttactaagagattggccgaacaatattggagaactccatcttacttgtggtccaagttgatcttgtccgttatctcccaaattttcatcggcttcactttcttcaaggccgattcttcattgcaaggtctgcaaaatcaaatgctgtccattttcatgttcaccctggttttcaaccctaccttgcaacaatatttgccaacctttgtttctcagagaggtctatacgaagctagagaaagaccatctaagaccttttcttgggtgtctttcatgttgtcccaaatcactgttgaaatcccatggaatattttggccggtactattggtttcatcatctactattatccagtcggcttttacaacaacgcttcaaaagctggtcaattgcacgaaagaggtgctttattttggttgtactgtaccgctttctacgttttcactggttctatggctcaagtatgtattgcaggtttggatgtagctgaagcagctggtgaattgggtagtttgttgtatactttggctttgtctttctgcggtgtcatggttactccatctaatatgcctagattctggctgttcatgtacagagtttcaccaatcacctacttcattgacggtgttttgtcaactggtgttgctaatgctgatgtacattgtgctgattacgaaatggttagattcactccaccagcaggtcaaacatgtggtcagtatatgtctagatatatcgaaactaccggtactggttacttggatgatccatctgctatggatgaatgcaagttctgttctgtctctgataccaatgaattcttgaaggccgttacatcctcttatgatcatcgttggagaaattacggtatcttcctggtctttatcttcgtcaattttgctttggcctctttcttgtactggctaatgagagttccaaagaagaggaatagagttgtcgacgaaagaaaacctgaagctcaaaaattggccagcaagtga

SEQ ID NO: 980 - protein, 1533 aa, Lachancea nothofagi
MKANKSNMAGDPHGSCDSAVLTRNTSPELPEYDGLDCSARASVRELARTFTNGSVASNSKAAAVGVHATTALPASRTTTEYGDVNTTNPVFSSSELPSYNSRLDPNSDEFSSALWVKNLSQLIASDPDHYKPYSLGCTWKNLRAYGNATDVAYQSTFANLPLQLLESGYRAARKARPEDSFDILKPMDGIVKPSELLVVLGRPGSGCSTLLKSISANTHGFHIDSDSEIFYDGMDPKEIAKHYRGEVVYNAESDVHFPHLTVFDTLKTVARLSCPSNRFHGVDRETFATHITEVAMATYGLSHTRNTKVGSELVRGVSGGERKRVSIAEVSICGSKFQCWDNATRGLDSATALEFIRALRTTAKLNNSAGVIAIYQCSQDAYDLFDKVCVLHEGYQIYFGPANEAKQYFLDMGYVSPDRQTTADFLTAVTNPAERIVNQEMVQAGKVVPSSASEMEAHWKQSENYKRLINEIDHYTTHDQTGNREQLRNAHIAKQSKRARHSSSYTVSYGLQVKYLLIRNMQRIRSSMGVTLFQVIGNGGMAFILGSMFYKILKHDTTAGFYSRAGALFFAVLFNAFSCLLEILALYEARPISEKHKRYSLYHPSADALASVISEIPSKLVTSVVFNLALYFLCNFKREAGAFFFYFLMTIVATFLMSHIFRCLGAATKTYAESMVSASLLLLAQAIYTGFAIPKTNILGWSKWIWYINPLSYIFESLMVNEFHGRNFSCSQYIPAGSGYEILSGTERVCSAVGAVPGQDFVSGETYINVAYGYYHAHKWRGLGIGLAYAIVFLAVYLAVTEFNESAKQRGEILVFPQSVMRRMKKERKLRNSSDYSGTDVENSAGSAPLNEKKMLDESSVSAGSTSSMGDAKLSKSEAIYHWRNVCFEVNIKKETRRILNNVDGWVKPGTLTALMGASGAGKTTLLDCLASRVTTGTITGDMFINGFLRDASFARSIGYCQQQDLHLESATVRESLRFAAYLRQPATVSEDEKNKYVEDVIKILEMETYANAVVGVAGEGLNVEQRKRLTIGVELAAKPKLLLFLDEPTSGLDSQTAWSICQLMRKLANHGQAILCTIHQPSALLMQEFDRLLFLQRGGQTVYFGELGKGCHKMIDYFESNGAPRCPDGANPAEWMLAVIGAAPGTHANQDYHEVWRNSPEYRAVQEELEWMEQELPKKPIDTSNEQTEFAASLLYQYYLVTKRLAEQYWRTPSYLWSKLILSVISQIFIGFTFFKADSSLQGLQNQMLSIFMFTLVFNPTLQQYLPTFVSQRGLYEARERPSKTFSWVSFMLSQITVEIPWNILAGTIGFIIYYYPVGFYNNASKAGQLHERGALFWLYCTAFYVFTGSMAQVCIAGLDVAEAAGELGSLLYTLALSFCGVMVTPSNMPRFWLFMYRVSPITYFIDGVLSTGVANADVHCADYEMVRFTPPAGQTCGQYMSRYIETTGTGYLDDPSAMDECKFCSVSDTNEFLKAVTSSYDHRWRNYGIFLVFIFVNFALASFLYWLMRVPKKRNRVVDERKPEAQKLASK

SEQ ID NO: 981 - DNA, 4482 bp, Zygosaccharomyces rouxii
  source 1..4482: mol_type = other DNA
atggacaaggacaacgaaaacgaaatcgaggaacctaatggttacgaagtttcttctgcttctggtagatatgaaggtttggatcaaactgctgcccaatccattaaggatttggctcaatctttgttggaagagtccagagaatctattcatgctgctggtgaaggtgttaatccagtttttatgtctgaatccggtgatgactacaacccaaaagttgatccagctaacgatgagttctctagcaaagaatggatcaagaacttgtccaccatcatcaaatctgacccatctttttacaagccatacaccttgggttgttcttggagagatttgtctgctgttggtgcttctgctgatgttgcttatcaaactactttcgaaaacttgccatggaaggctttgacttgggtttacagaagattgaaggctgctaacgaatctgataccttccaaattttgaagccaatggatggtattgtcaatccaggtgaattattggttgttttgggtagaccaggttctggttgtactactttgttgaagtccatttcctctaacacccatggtttcaaggttaccgaagattccaagatttcttactctggtttgtccccaaaggatatcaagagacattttagaggtgaagttgtctacaacgccgaatccgatattcatttgccacatttgactgtctaccaaaccttgttgactgttgctagattgaaaaccccacaaaacagaattccaggtgtcgatagagaatcttgggctaaacatgttactgaagttgctatggctacttacggtttgtctcatacaagaaacacaaaggttggtggtgatttggttagaggtgtttctggtggtgaaagaaagagagtttctattgccgaagttaccatttgcggttctaagtttcaatgttgggataacgctaccagaggtttagattctgctactgctttggaattcattaaggccttgaaagctcaagccgaaatagttgattctgctgcttgtgttgctatctaccaatgttctcaagatgcctacgatttgttcgataaggtttgtgtcttgtactccggttaccaaatctattttggttctgctaagaacgccaagagatactttcaacaaatgggttactactgcccatctagacaaactactgctgatttcttgacctctattacttctccagccgaaagaattatcaacaacggttacattgagaagggtatcaacgttccacaaactccagaagaaatgtctgattactggaagaactctccagaatacgagaatttggtcagagaaaccgacgaattcatctcccaagatcataactctaagatcagctccattagagaagcacatcaagctagacaatctaagagagctagaccagctgaaccatatactgtttcttatttgatgcaggtcaagtacctgctgatcagaaacatttggagaatccagaactcctactctattaccgctttccaagttatcggtcattctgttatggctttgttgttgggttctatgttctacaaggttatgaagcacacttctaccgataccttttactatagaggttccgctatgttcttcgccgttttgtttaatgctttctcctccttgttggaaatcttcagcttgtatgaagccagaccaattactgaaaagcacagaacctactcgttgtatagaccttcagctgatgctttcgcttccattttgtctgaaattccagctaagattttgaccgccatcttctttaatttggcctactacttcttggtcaacttcagacgtgatggtggtagatttttcttctacttcctgatcaacatcgtcggtactttcactatgtctcatttgttcagatgcgttggttctttgactaagactttgactgaagctatgattccagcctccatcttgttgttaggtatggctatgtatgctggtttcgctattccagaaactaagatgttaggttggtctaagtggatctggtacattaacccattgtcctacttgttcgaagctttgatgactaacgaattccacgatagaaagttcccatgtgctacttttattccatcaggtggtgaatacgaacagttcagaggtaaagaaagaatctgtggtgttgttggttcagtcccaggtgaaaattatgtattgggtgacaacttcctgaaaaagtcctacaactacgatatcgaacataagtggcgtgcttttggtgttggtatggcatacgttattttctttttcttcgtgtacctgttcctgtgcgaaatcaatgaaggtgctaaacaaaagggtgagatcttggtttttccacagactgttgttagaaagatgaggaagcaaaagaagatcagatccagaacaaacgccttgaacgatttggaaaagaacatcggtactaatgctaccaacttgactgataccactctggtcaaagaatcttccgattctactgatgaagtccaagagcaatctggtttgacaaagtctaaggctattttccattggaggaacttgtgctacgatgttcaaatcaaagctgaaaccagaaggatcttgtctgacgttgatggttgggttaagccaggtactttaactgctttgatgggttcttctggtgctggtaaaactacattattggattgcttggctgaaagggttactatgggtgtaattaccggtgatattttcgtcaacggtaagagaagagatgcctcatttccaagatctattggttactgtcaacaacaggacttgcatttgaaaactgctactgttagagagtccttgttgttctctgctatgttgagacaacctaagaacgttccaactagcgaaaagaagaagtacgttgaagaagtcatcaagatcctagagatggaaccatatgctgatgcagttgttggtgttgccggtgaaggattgaatgttgaacagagaaaaagattgaccatcggtgttgaattggttgctaaacctaagctgttggttttcttggatgaacctacaagtggtttggattctcaaacagcttggtctatttgccagttgatgagaaagttggttaacagaggacaagctattttgtgcactatccatcaaccatccgcaatcttgatgcaagaatttgataggttgctgttcttgcaaaaaggtggtgagactgtttactttggtgaattgggtgatgaatgctccatcatggttgattactttgaaagaaacggtgctcataagtgtccaccaaatgctaatccagctgaatggatgttggaagttgtaggtgctgctccagcttctcatgctaacaaggattatcatcaagtttggaaggactccaaagagtaccaagaaattcaatgcgaattgaacaggttggagagggaattgaaagatcatggtaatgaggataatgaagagggccataagtcttacgctaccgatattttctctcagatcgttatcgtttcccacaggttctttcaacactattggagatcaccaagatacttgtggccaaagttgtttttgactgccttcaacgaaattttcatcggcttcactttcttcaaagagaagcgttctttacagggtgttcaaaaccagatgttgtctacctttgtcttttgcgttatcttcaacccaatcttgcaacaattcttgccagtttacgtcgaacaaagaaacttgtacgaagcaagagaaagaccatctagaaccttttcttggtttaccttcatcgtgtcccaaatcatcgttgaaattccttggaactttttggctggtactattgcctttttcgtctactattatcccgtgggtttttacagaaatgcttccgaagctaatcagttgcacgaaagaggtgcattatactggttgttctgtacagcatttttcgtttgggttggttccatggctattttggctaactcttttgttgaatacgctgctgaagcttctaacttggctttattgtgtttcgctttctctttggctttcaacggtgttttagttccaccaaacaaaatgcctaggttttggatcttcatgcacagagtttctccattgacctactacattgattccgctttgtctgtcggtatggcaaatgttggtgtaaaatgttctgcctacgaatacgttcaattcaagccaccagttaatcaaaactgcggtcaatacttgaacagctacattaactctactggtactggttacttggctaatccaaacgctactgatcaatgttctttctgcccaatttccgaaactaacgtttacttggaaactaggggctcctattacaaacatagatggcgtaactacggtatcttcttgtgtttcattgccttcgattatgttgccgccattttcttatattggttggctagagttccaaagggtaacagagttagcaagaaaatcaagtaa

SEQ ID NO: 982 - protein, 1493 aa, Zygosaccharomyces rouxii
MDKDNENEIEEPNGYEVSSASGRYEGLDQTAAQSIKDLAQSLLEESRESIHAAGEGVNPVFMSESGDDYNPKVDPANDEFSSKEWIKNLSTIIKSDPSFYKPYTLGCSWRDLSAVGASADVAYQTTFENLPWKALTWVYRRLKAANESDTFQILKPMDGIVNPGELLVVLGRPGSGCTTLLKSISSNTHGFKVTEDSKISYSGLSPKDIKRHFRGEVVYNAESDIHLPHLTVYQTLLTVARLKTPQNRIPGVDRESWAKHVTEVAMATYGLSHTRNTKVGGDLVRGVSGGERKRVSIAEVTICGSKFQCWDNATRGLDSATALEFIKALKAQAEIVDSAACVAIYQCSQDAYDLFDKVCVLYSGYQIYFGSAKNAKRYFQQMGYYCPSRQTTADFLTSITSPAERIINNGYIEKGINVPQTPEEMSDYWKNSPEYENLVRETDEFISQDHNSKISSIREAHQARQSKRARPAEPYTVSYLMQVKYLLIRNIWRIQNSYSITAFQVIGHSVMALLLGSMFYKVMKHTSTDTFYYRGSAMFFAVLFNAFSSLLEIFSLYEARPITEKHRTYSLYRPSADAFASILSEIPAKILTAIFFNLAYYFLVNFRRDGGRFFFYFLINIVGTFTMSHLFRCVGSLTKTLTEAMIPASILLLGMAMYAGFAIPETKMLGWSKWIWYINPLSYLFEALMTNEFHDRKFPCATFIPSGGEYEQFRGKERICGVVGSVPGENYVLGDNFLKKSYNYDIEHKWRAFGVGMAYVIFFFFVYLFLCEINEGAKQKGEILVFPQTVVRKMRKQKKIRSRTNALNDLEKNIGTNATNLTDTTLVKESSDSTDEVQEQSGLTKSKAIFHWRNLCYDVQIKAETRRILSDVDGWVKPGTLTALMGSSGAGKTTLLDCLAERVTMGVITGDIFVNGKRRDASFPRSIGYCQQQDLHLKTATVRESLLFSAMLRQPKNVPTSEKKKYVEEVIKILEMEPYADAVVGVAGEGLNVEQRKRLTIGVELVAKPKLLVFLDEPTSGLDSQTAWSICQLMRKLVNRGQAILCTIHQPSAILMQEFDRLLFLQKGGETVYFGELGDECSIMVDYFERNGAHKCPPNANPAEWMLEVVGAAPASHANKDYHQVWKDSKEYQEIQCELNRLERELKDHGNEDNEEGHKSYATDIFSQIVIVSHRFFQHYWRSPRYLWPKLFLTAFNEIFIGFTFFKEKRSLQGVQNQMLSTFVFCVIFNPILQQFLPVYVEQRNLYEARERPSRTFSWFTFIVSQIIVEIPWNFLAGTIAFFVYYYPVGFYRNASEANQLHERGALYWLFCTAFFVWVGSMAILANSFVEYAAEASNLALLCFAFSLAFNGVLVPPNKMPRFWIFMHRVSPLTYYIDSALSVGMANVGVKCSAYEYVQFKPPVNQNCGQYLNSYINSTGTGYLANPNATDQCSFCPISETNVYLETRGSYYKHRWRNYGIFLCFIAFDYVAAIFLYWLARVPKGNRVSKKIK

SEQ ID NO: 983 - DNA, 4530 bp, Naumovozyma dairenensis
  source 1..4530: mol_type = other DNA
atgtccgagaagccagatattgctgaaaactctgcttctattgatgatgacgcttcctcttctcaatccaacttgcatgaataccatggtttcgattacgatgccgaacaaagagttagagatttggctagatctttgacccatcaatccggtaacatttccacctactctaatcaagatgctgccaccgaatctattttcactccagatatggaaggtatcaacccaatcttcactaacaaagaagctgaagagtacaacgaaaagttggatcctacttccgaaaacttctcatctaaagcttgggttcaaaacatggctaacgttgttacttctgacccagaattttacaagccatactctttgggttgtgtctggaaaaatttgtctgcttctggtgaatcttccgatgttgcttatcaatctaccgttttgaacatgccctacaagttgttgaattccgcttttagaaaagccagatctaccaagactgaagatagattccaaatcttgaagccaatggatggttgtttgaaccctggtgaattattggttgttttgggtagaccaggttctggttgtactactttgttgaagtccatttcctctaacactcacggttttgatgttggtgaagatagcgttttgtcttacgctggttttacaccagatgacatcaaaaagcactacagaggtgaagttgtttacaacgctgaagccgatattcatttgccacatttgactgtttacgaaaccttgtacaccgtgtctagattgaaaactccacagaatagaatcaagggtgttgatagagataccttcgctagacatttgaccgaagttgctatggctacttatggtttgtctcataccagaaacactaaggttggtgatgatttcgttagaggtgtttcaggtggtgaaagaaagagagtttcaattgccgaagtttccatttgcggttctaagtttcaatgttgggataacgctactagaggtttggattctgctactgctttggaattcattagagccttgaaaacccaagccactattgcttcatctgctgctactgttgctatctaccaatgttcacaagatgcctacgatttgttcgataaggtttgtgttttggacggtggttaccaaatctactttggtccaggtaatgaagccaaaaagtacttcgaagatatgggttacaagtgcccagatagacaaactactgctgatttcttgacttctgttacatctccagccgaaagaatcattaacccagatttcattaagaggggtattgccgttccacaaactccaaaggatatgggtgaatactggttgaagtctcaaaactacaaggacctgatgaaggaaatcgaccaaaagttgaacaacgacaacatcgaagaatctagaaccgctgtaaaagaagctcatattgccaagcaatctaagagagctagaccatcttctccatacactgtttcttatatgttgcaggtcaagtacctgctgactagaaacttttggagaattagaaacaacgccggtgtgtccttgttcatgattattggtaattctgccatggccttcatcttgggttctatgttttacaaggttatgaagaagggtgacacctctactttttactttagaggtgctgctatgttcttcgccgttttgtttaatgctttctcgtccttgttggagatcttcacattatatgaagccagaccaattaccgaaaagcacagaacttacagcttgtatcatccatctgctgatgctttggcttctgttttctctgaattgccaactaagtgcattatcgctgtttgcttcaacatcatcttctatttcttggtcgacttcaagagaaacggcgatactttctttttctacctgttgatgaacgtcttgggtgtcttgtctatgtctcatttgtttagatgcgttggctctttgactaagactttgtctgaagctatggttccagcttctatgttgttgttggctttgtcaatgtttaccggtttcgctattccaaagaccaaaatgttaggttggtctgaatggatctggtacatcaatccattgtcctacttgttcgagtccttgatgattaacgaattccacggtagaagattcgcttgtgctcaatttgttccatttggtcctgcttacgctaacattaacggtacaaacagaatttgctctaccgttggtgctgtagctggtcaagattatgttttaggtgacgacttcgtcaaagagtcttacggttacgaacacaaacataagtggcgttctttaggtattggtttggcctacgttatcttcttcttgttcttgtacttggtcttgtgcgaattcaatggtggtgctaaacaaaagggtgagattttggttttcccacagggtattatccgtaagatgaagaagcaaggtaagatccaagaaaagaaagctgccggtgatattgaaaatgctggtggttcaaatgtttccgacaagcaattattgaacgatacctccgaagattccgaggattctaattcaggtgttggtatctcaaagtccgaagccatttttcattggagaaacttgtgttacgacgtccaaatcaaaactgaaaccagaaggatcctgaacaacgttgatggttgggttaagccaggtactttgactgctttgatgggtgcttcaggtgcaggtaaaactactttattggattgcttagctgaaagggttaccatgggtgttattactggtgaagtttctgtcaatggcagattgagagatgaatctttcccaagatctatcggttactgtcaacaacaagacttgcacttgaaaacatctaccgtcagagaatccttgagattctctgcttatttgagacaaccatcggatgtttccattgaagagaagaacaagtacgtcgaggaaatcattaagatcttggagatggaaaagtacgctgatgctgttgttggtgttgctggtgaaggtttgaatgttgaacagagaaaaagattgaccatcggtgttgaattggctgctaaacctaagttgttggtctttttggatgaacctacatctggtttggatagtcaaactgcttggtctatttgccagctgatgaagaaactagctgatcatggtcaagctattttgtgcactattcatcaaccatccgccatcttgatgcaagaatttgataggttgttgttcatgcagagaggtggtaaaactgtttactttggtgacttaggtaagggttgccaaaccatgattgattactttgaaagaaacggctctcataagtgtccaccagatgctaatcctgcagaatggatgttggaagttgtcggtgctgctccaggttctcatgcaaatcaagattactatgaagtctggcgtaattccgctgagtacaaagctgttcatgaagaattggaatggatggctactgagttgccaaagaaatctccagaaacaagtgctgacgaacaacatgaattcgctacttctatcttgtaccagtctaagttggtttgtcgtagattgggtgaacagtattggagatcaccagaatatttgtggtccaagttcatcctgactatctttaaccagttgttcatcggtttcactttcttcaaggctgatacttctttacagggcttgcaaaatcaaatgttggccattttcatgttcaccgtcatcttcaatcctatcttgcaacaatacttgccaacctttgttcaacagagagacttgtacgaagctagagaaagaccatctagaactttttcttggctggctttcattatctcccaaatcgttgttgaaatcccctggaatttgttggctggtacaattgcttactttatctactactacccaatcggcttttacagaaatgcttctgaagcaggtcaattgcacgaaagaggtgctttgttttggttgttctcttgtgcttactacgtctacattggttctatgggtttgatgtgcatcagcttcaacgaaattgcagaaaatgcagctaacaccgcttctttgatgtttactatggccttgtctttctgtggtgttatgactactccatctaacatgccaagattctggatcttcatgtacagagtttcacctttgacctacttgattgatgccttgttgtctgttggtgtcgctaatgttgatgctcattgctctgattatgagttgttgagatttgctccagctaacggtatgacttgtggtgagtatatggctccttacattcaatctgttggtactggttacttgaaggattcttctgctacagatgaatgtgctttctgtactgtttctgacaccaattcttacttggcctctgtttcatctcattacaagaatagatggcgtaacttcggtatcttcatttgctttattgccttcaactacatggccggtattctgttttattacttggctagagttcccaagaaaggtaacggtttgttttcgaagttcaagaagtaa

SEQ ID NO: 984 - protein, 1509 aa, Naumovozyma dairenensis
MSEKPDIAENSASIDDDASSSQSNLHEYHGFDYDAEQRVRDLARSLTHQSGNISTYSNQDAATESIFTPDMEGINPIFTNKEAEEYNEKLDPTSENFSSKAWVQNMANVVTSDPEFYKPYSLGCVWKNLSASGESSDVAYQSTVLNMPYKLLNSAFRKARSTKTEDRFQILKPMDGCLNPGELLVVLGRPGSGCTTLLKSISSNTHGFDVGEDSVLSYAGFTPDDIKKHYRGEVVYNAEADIHLPHLTVYETLYTVSRLKTPQNRIKGVDRDTFARHLTEVAMATYGLSHTRNTKVGDDFVRGVSGGERKRVSIAEVSICGSKFQCWDNATRGLDSATALEFIRALKTQATIASSAATVAIYQCSQDAYDLFDKVCVLDGGYQIYFGPGNEAKKYFEDMGYKCPDRQTTADFLTSVTSPAERIINPDFIKRGIAVPQTPKDMGEYWLKSQNYKDLMKEIDQKLNNDNIEESRTAVKEAHIAKQSKRARPSSPYTVSYMLQVKYLLTRNFWRIRNNAGVSLFMIIGNSAMAFILGSMFYKVMKKGDTSTFYFRGAAMFFAVLFNAFSSLLEIFTLYEARPITEKHRTYSLYHPSADALASVFSELPTKCIIAVCFNIIFYFLVDFKRNGDTFFFYLLMNVLGVLSMSHLFRCVGSLTKTLSEAMVPASMLLLALSMFTGFAIPKTKMLGWSEWIWYINPLSYLFESLMINEFHGRRFACAQFVPFGPAYANINGTNRICSTVGAVAGQDYVLGDDFVKESYGYEHKHKWRSLGIGLAYVIFFLFLYLVLCEFNGGAKQKGEILVFPQGIIRKMKKQGKIQEKKAAGDIENAGGSNVSDKQLLNDTSEDSEDSNSGVGISKSEAIFHWRNLCYDVQIKTETRRILNNVDGWVKPGTLTALMGASGAGKTTLLDCLAERVTMGVITGEVSVNGRLRDESFPRSIGYCQQQDLHLKTSTVRESLRFSAYLRQPSDVSIEEKNKYVEEIIKILEMEKYADAVVGVAGEGLNVEQRKRLTIGVELAAKPKLLVFLDEPTSGLDSQTAWSICQLMKKLADHGQAILCTIHQPSAILMQEFDRLLFMQRGGKTVYFGDLGKGCQTMIDYFERNGSHKCPPDANPAEWMLEVVGAAPGSHANQDYYEVWRNSAEYKAVHEELEWMATELPKKSPETSADEQHEFATSILYQSKLVCRRLGEQYWRSPEYLWSKFILTIFNQLFIGFTFFKADTSLQGLQNQMLAIFMFTVIFNPILQQYLPTFVQQRDLYEARERPSRTFSWLAFIISQIVVEIPWNLLAGTIAYFIYYYPIGFYRNASEAGQLHERGALFWLFSCAYYVYIGSMGLMCISFNEIAENAANTASLMFTMALSFCGVMTTPSNMPRFWIFMYRVSPLTYLIDALLSVGVANVDAHCSDYELLRFAPANGMTCGEYMAPYIQSVGTGYLKDSSATDECAFCTVSDTNSYLASVSSHYKNRWRNFGIFICFIAFNYMAGILFYYLARVPKKGNGLFSKFKK

SEQ ID NO: 985 - DNA, 4584 bp, Wickerhamomyces ciferrii
  source 1..4584: mol_type = other DNA
atgaccgagaacatccacttgggtgatcaagtttctaaaacctctgctcaatctgtcgaagagtacaagggttttgattccaacgttgatgataacatccaacacttggctagaaagttgactaacgcttctcaatcttctttgccagctgctgctggtgaagatcaacaatattaccaaaacaacaacgacttggaagcccaacaatctttgtctagagtttctactattgccccaggtgttgttgctattaacaacccagatattgatccaagattggacccaaactctgaccaattcaattctagattctgggtcaagaacttcaagaacctgatggataaggatccagaacactacaagtcttactcattgggtattgcctacaagaacttgagagctactggtgaagcagctggtgctgattatcaaactactgttatgaatgccccattgaagtacgctaatttggctaagaaggctttcttcacttccaaggctaagaaagaagctggtagattcgatatcttgaagtccatggatgctttggttagaccaggtgaagttgttgttgtcttaggtagacctggttctggttgttctactctgttgaaaactattgcctctaacactcatggtttcgccattggtgaagaggctgaaatttcttatgaaggcttgtccccaaaggatatcagaaaacattatagaggtgaggttgtctacaacgccgaatctgatattcatttcccacatttgactgtctggcaaactttgtctactgttgctaaattcagaaccccacaaaacagaattccaggtatctcaagagaagattacgctaaccatttgaccgaagtttacatggctacttatggtttgtctcataccaagaacactaaggtcggtaacgaaaatgttagaggtgtttctggtggtgaaagaaagagagtttcaattgccgaagtttctttgtctggtgctagattgcaatgttgggataatgctactagaggtttggatgctgctactgctttggaattcattagagctttgagaacccaagctgatgttttggatacaactgctttcgttgctatctaccaatgttctcaagatgcctacgatttgttcgataaggttactgtcttgtacgaaggtcaccaaatctattttggtagaggtgatgaagccagggaatactttattaagatgggttggtattgccctcaaagacaaactacagctgatttcttgacttctgttacctctccaagagaaagagttccacaagaaggtttcgaaaacaaggttccaaaaactccacaagagttcgaaacttactggaagaactctccagaatacgccaagttgattaaggatatcgactctgaattcaagcaccaacacgaacaaaactctaaaggtttggtcaaagaagcccacaacaagaagcaagccaaacatattagaccaacctcttcatacactgtgtctttctggatgcaaaccagatacttgttgaccagagatttccaaagaatctggaacgatttcggcttcaactcttttcaagttttcgccaattctttcatggccctgattttgtcctctatcttttacaacttgccaaagaccaccgactcattttactacagaggtgctgctatgtttttcgccgttttgtttaatggcttctcgtccttcttggaaatcatgactttgtttgaagccagaccaatcatcgaaaagcacaagcaatactcgttgtatcatccatctgctaacgctttgtcatccgttttgtctcaattgccagctaagatctttacctccattgctttcaacctggtcttttacttcatggtcaacttcagaagaaacccaggtagattcttcttctactacttggttaacttgaccgctaccttctctatgtctcatttgtttagattggttggttctgctgctacatctttaccagaagctttggttccagctcaagttttgttgttggctttgactattttcgtcggtttcaccattccagtcaactatatgttaggttggtccagatggatcaactacttggatccattggcttatgctttcgaagctttgatggcaaatgaattcgctggtgttacttacgattgctcatcttttgttccaggtgacccaagatctattccaaacattccatctgatggtttcatctgcaatgctgttggtgcacaaactggtgagtttactgttgatggtactacctatttggaagtcgcttacaagtacaagaattcccatagatggcgtaactggggtattactttagcttttgctttgttcttcctggccatctacttagttttctctgagtacaatgaatccgccatgcaaaagggtgaagtcttgttatttcaaaggtccaccttgcgtaagctgaagaaagaaaaagctgcttcccaaaacgaattggagtctggtaatgagaagggtgttgttccaaacggtgaagatgttgataaggatgttgatgttattcacgctggtactcaaactttccattggagagatgttcattacaccgtcaagatcaagaaagaggacagagaaattttgtcaggtgttgacggttgggttaagccaggtactttgactgctttaatgggtgcttctggtgctggtaaaactaccttgttagatgtcttggctaacagagttactatgggtgttgtaactggtgatatgttcgttaacggtcacttgagagataacagcttccaaagatctactggttacgttcaacaacaggacttgcatttgagaactgctactgttagagaagccttgaagttttctgcttacttgagacaaccagcctctgtttctactgctgaaaaagatcaatacgtcgaagaggtcatctccattttggatatggaaaagtatgctgatgccgttgttggtgttgccggtgaaggtttgaatgttgaacagagaaaaagattgaccatcggtgttgaattggctgctaaacctaagctgttgttattcttggatgaacctacctctggtttggattctcaaactgcttggtctatttgccagttgatgagaaaattggctaaccatggtcaagccattttgtgtactattcatcaaccatccgccatcttgatgcaagaatttgatagactgttgttcttggccagaggtggtaagactgtttattttggtgatttgggtaagaattgccagaccttgattgactactttgaaaagtacggtgctccaaaatgtccacctgaagctaatccagctgaatggatgttacatgttattggtgctgctccaggttctcatgctaatcaagattattaccaagtctggttgaactccaccgaaagacaagaagttaagcaagaattggacaggatggaaagagaattgtcccaattaccaagagatgattccatcgatcataacgaatacgctgctccattctggaaacaatatggtatcgttacccaaagagtgttccaacagtattggagatcaccaatctacatctactccaagttgttcctagctatctcctcttctatgtttatcggttttgctttctttaaggccaagaataccagacaaggcttgcaaaatcaaatgttcgctctgttcatgttcctggttattttcaacgccttgatccaacaaacattgcctgaatatgttagacagagagagttgtacgaggttagagaaagaccatctaagactttttcatggaaggcctttattaccgctcaaatcacatctgaagttccttggaatgctctggttggtactattgcatttttggtgttttattacccagtcggcttctacaacaatgctgctcctaatggtagtgctgaagttcatgatagaggtgcttacgcttggtttttgacagttttgtttttcgtctacaccggttctttcgcccatttggttattgctccattggaattagctgatgctgcaggtaatttggcctctttgattttcactttgtgcttgactttctgcggtgttttggttacatcagaaggtttgccaggtttctggattttcatgtatagagtctctccattcacctacttcattgacggtttcttgtctaatgccgttgctcataatgttgttaagtgctccgattccgaattggttcatttttcacctccacaaggtgctacttgtggtgattatatgaaggaatacttggaaaaggctggtacaggttatgttgaagatccatcttctacatctgaatgcggtttctgctctatttcttctacagatgcctttttgaaggtcgtcaaattggattatggtagacgttggagaaacgtcggtattttcattgccttcatcgttatcaactggatcttggccgttttcttttattggttggctagagtcccaaagaagaacgatagagttaagtcaggtgctgaagctgaatctacaaacaagaccgttcaaaagcaagaaactgcctccattatcgagaaagaagagtcatcttctaactccaaggcttaa

SEQ ID NO: 986 - protein, 1527 aa, Wickerhamomyces ciferrii
MTENIHLGDQVSKTSAQSVEEYKGFDSNVDDNIQHLARKLTNASQSSLPAAAGEDQQYYQNNNDLEAQQSLSRVSTIAPGVVAINNPDIDPRLDPNSDQFNSRFWVKNFKNLMDKDPEHYKSYSLGIAYKNLRATGEAAGADYQTTVMNAPLKYANLAKKAFFTSKAKKEAGRFDILKSMDALVRPGEVVVVLGRPGSGCSTLLKTIASNTHGFAIGEEAEISYEGLSPKDIRKHYRGEVVYNAESDIHFPHLTVWQTLSTVAKFRTPQNRIPGISREDYANHLTEVYMATYGLSHTKNTKVGNENVRGVSGGERKRVSIAEVSLSGARLQCWDNATRGLDAATALEFIRALRTQADVLDTTAFVAIYQCSQDAYDLFDKVTVLYEGHQIYFGRGDEAREYFIKMGWYCPQRQTTADFLTSVTSPRERVPQEGFENKVPKTPQEFETYWKNSPEYAKLIKDIDSEFKHQHEQNSKGLVKEAHNKKQAKHIRPTSSYTVSFWMQTRYLLTRDFQRIWNDFGFNSFQVFANSFMALILSSIFYNLPKTTDSFYYRGAAMFFAVLFNGFSSFLEIMTLFEARPIIEKHKQYSLYHPSANALSSVLSQLPAKIFTSIAFNLVFYFMVNFRRNPGRFFFYYLVNLTATFSMSHLFRLVGSAATSLPEALVPAQVLLLALTIFVGFTIPVNYMLGWSRWINYLDPLAYAFEALMANEFAGVTYDCSSFVPGDPRSIPNIPSDGFICNAVGAQTGEFTVDGTTYLEVAYKYKNSHRWRNWGITLAFALFFLAIYLVFSEYNESAMQKGEVLLFQRSTLRKLKKEKAASQNELESGNEKGVVPNGEDVDKDVDVIHAGTQTFHWRDVHYTVKIKKEDREILSGVDGWVKPGTLTALMGASGAGKTTLLDVLANRVTMGVVTGDMFVNGHLRDNSFQRSTGYVQQQDLHLRTATVREALKFSAYLRQPASVSTAEKDQYVEEVISILDMEKYADAVVGVAGEGLNVEQRKRLTIGVELAAKPKLLLFLDEPTSGLDSQTAWSICQLMRKLANHGQAILCTIHQPSAILMQEFDRLLFLARGGKTVYFGDLGKNCQTLIDYFEKYGAPKCPPEANPAEWMLHVIGAAPGSHANQDYYQVWLNSTERQEVKQELDRMERELSQLPRDDSIDHNEYAAPFWKQYGIVTQRVFQQYWRSPIYIYSKLFLAISSSMFIGFAFFKAKNTRQGLQNQMFALFMFLVIFNALIQQTLPEYVRQRELYEVRERPSKTFSWKAFITAQITSEVPWNALVGTIAFLVFYYPVGFYNNAAPNGSAEVHDRGAYAWFLTVLFFVYTGSFAHLVIAPLELADAAGNLASLIFTLCLTFCGVLVTSEGLPGFWIFMYRVSPFTYFIDGFLSNAVAHNVVKCSDSELVHFSPPQGATCGDYMKEYLEKAGTGYVEDPSSTSECGFCSISSTDAFLKVVKLDYGRRWRNVGIFIAFIVINWILAVFFYWLARVPKKNDRVKSGAEAESTNKTVQKQETASIIEKEESSSNSKA

SEQ ID NO: 987 - DNA, 4554 bp, Lachancea dasiensis
  source 1..4554: mol_type = other DNA
atggttgataacgttgctccaaacggtgcttcttaccaaaacaacaatatcggtaacgaaatggccgccgatgatatttctgaacaagcttcttcaccaggtgtttacagaggttttgaatctggtgctcaacaatccgttagaaacttggctagatctttgactaacagatctggtgatgctgtttctatggctgctgattggaacactattaacccagttttctctaccgttgagtctccatcttatgatccaagattggacccaaactctgacgaattttcttcttctttgtgggtccaaaacctgtctcaattggtttcttctaacccagatcactacaagccatattctttgggttgttcttggagaaacttgagagcttacggtaactctactgatgttgcttaccaatccactgttgttaacttgccattgcaattggttgaatacgtctatagagctgctagaaaagctagaccagaagataccttcgatatcttgaaacctatggatggtatggttaagccaggtgaattattggttgtattgggtagaccaggttctggttgttctactttgttgaagtctatctcctctaacacccatggtttccatatcgacaaagaatccgaaatctcttacgatggcttgtccccaaaagaaatctctagacattatagaggtgaggttgtttacaacgctgaagctgatgttcatttcccacatttgtctgttttcgacaccttgaaaactgttgctagattagcttgtcctaccaacagaatccaaggtgttgatagagaaactttcgctacccatattaccgaagttgctatggctacttatggtttgtctcataccagaaacactaaggtgggtaacgaattggttagaggtgtttcaggtggtgaaagaaagagagtttctattgccgaagtctctatttgcggttctaagtttcaatgttgggataacgctactagaggtttggattcagctactgctttggaattcattagagctttgagaacccaagctaagatgactagatcttctgctgttattgctatctaccaatgctctcaagatgcctacgatttgttcgataaggtttctgttttacacgagggttaccaaatctacttcggtagagctaaagaagccaagcaatacttccaagatatgggttatgtttgcccagatagacaaactactgctgatttcttgactgctgttactaatccagccgaaagaatcttgaatgaggatatggtaaaggccggtaagaagattccattaactgctgctgaaatggaagctcattggaaacaatctgaagcttacaagggtttgttgcaagaaatcgattactactctacccatgatcaagccaacaacagacaacaattgaaagaagctcacgtcgctaagcaatctaaaaaggctagagcacaatctccatacactgtctcttacggtttacaggttaagtacctgttgatcagaaacatgcagaggattagaaacaacatgggtatcaccttgttccaagttattggtaatggtggcatgtccttcattttgggttctatgttttacaaggctttgaagcacgatgataccgctggtttttattctagagctggtgctttgtttttcgccgttttgtttaatgctttcagctgcatgttggaaatcttggcattatatgaagccaggccaatctccgaaaaacacaagagatattccttgtaccatccttctgctgatgctatggcatctgttatttcagaaattccagctaagctgttgacctctttgactttcaatttggctatgtacttcctgtgcaactttaaaagagaagctggcgctttcttcttttacttcttgatgactatggttggcacctttgctatgtcccatattttcagatgtttaggtgcttccactaagacctatgctgaatctatggttccagcttctttgttgttgttagctttggctatctacaccggttttgctattccaaagaccaagattttaggttgggctaaatggatctggtacatcaatccattgtcctacatcttcgaatccttgatggttaacgaattccacggtagacaattcaagtgctctcaatttgttccagctggtccaggttacgaaaatgttagtggtactcaaagagtttgctctgctgttggtgctttaccaggtgaagattacgtttctggtgaaaggtatattaacgtcgcctacaactattaccattctcataagtggcgtggtttaggtattggtttggcttacgctattttctttttgggtgtttacttggctgtcaccgaattgaatgaatctgctaaacaaaggggtgagatcttggtttttccacaagctgttatgagaaggatgaagaagcaaagaaagttaagagctggtacaaacgctaacggttccgatattgaaaacactgctggtgttgctacattgaacgaaaagaagatgctggaagagtcctctaattctgttgcttcatcttcttctatgggtgacgttaagttgtcatcttctgaagctactttccactggaagaacgtttgttttgaagtcccaatcaagaaagaaaccagaaggatcttggataacgtagatggttgggtaaaaccaggtactttgactgctttgatgggtgcttctggtgctggtaaaactactttattggactgtttggcctctagagttactactggtactattactggtgacatgttcatcaacggtttcttgagagatgcttctttcgctagatctattggttactgtcaacaacaagacttgcacttgcaaactgctactgttagagaatctttgagattctccgcttacttgagacaaccatcttctgtttctaagtccgagaaagaaaagtatgttgaggacgtgattaagatcttggagatggaaacttatgctgatgcagttgttggtgttgccggtgaaggtttgaatgttgaacaaagaaaaaggttgaccatcggtgttgaattggctgctaaacctaagttgctgttgtttttggatgaacctacatctggtttggactctcaaactgcttggtctatttgtcagttgatgagaaagttggctaaccatggtcaagctattttgtgcactattcatcaaccatccgctttgttgatgcaagaatttgataggttgctgttcttgcaaagaggtggtaagactgtttactttggtgacttaggtaagggttgccaaaccatgattgattactttgaaaagaacggtgctcatccatgtcctgctggtgctaatcctgctgaatggatgttggaagttataggtgctgctccaggttctcatgctaatcaaaattactctgaagtctggcgtaactcctctgagtacaaagctgttcaagaggaattggagtggatggaaaaagaattgccaaaaagaccattcgacaactcctcagaacaaactgaatttgctacctctttggtttaccagtacactttggttaccaagagattggtcgaacaatattggagaacaccatcttacttgtggtctaagattggtttgaccatcatctcccaaatcttcatcggtttcactttcttcaaggccgataattccatgcaaggcttgcaaaatcaaatgctgtccatcttcatgttctccgttattttcaatccaaccttgcaacagtacttgccaacttttgttgctcaaagagacttgtacgaagctagagaaagaccatctagaactttttcttgggtcgctttcatcttgtcccaaattactgttgaaatcccctggaacattattgcaggtactataggtttcttggtctactattatccagtcggcttgtattctactgcttctaaagctggtcaattgcacgaaagaggtgctttattttggttgtacgctacagcttactacgttttcactggttcaatggctcaattgtgtattgctggtcaagaagttgctgaaccagcaggtcaaatggctagtttgttgttcactctgtctttgtctttctgcggtgttttggttggtccatcatcaatgccaggtttttggaagtttatgtacagagtctctccattgacctacttcgttgatggtactttgtctactggtattgctaacggtaaagttcaatgctccgattacgagttggttaagtttaaaccagctaatggtatgacctgtggtgagtatatggaaccttacattaagttggttggtacgggttatttgtctgatccatctgctactgatgaatgcagattttgttccgtttctaccaccaacgattacttgtcagctgtttcttcatcatactctagaaggtggcgtaattatggtatcttcctagtgtacattttcttcaacttcgctatggccgttttcatatattggttggctagagttcctaagaagagaaatagagttgctgatgaacgtaagaccgaagctcaaaagttagtcgaaaagtaa

SEQ ID NO: 988 - protein, 1517 aa, Lachancea dasiensis
MVDNVAPNGASYQNNNIGNEMAADDISEQASSPGVYRGFESGAQQSVRNLARSLTNRSGDAVSMAADWNTINPVFSTVESPSYDPRLDPNSDEFSSSLWVQNLSQLVSSNPDHYKPYSLGCSWRNLRAYGNSTDVAYQSTVVNLPLQLVEYVYRAARKARPEDTFDILKPMDGMVKPGELLVVLGRPGSGCSTLLKSISSNTHGFHIDKESEISYDGLSPKEISRHYRGEVVYNAEADVHFPHLSVFDTLKTVARLACPTNRIQGVDRETFATHITEVAMATYGLSHTRNTKVGNELVRGVSGGERKRVSIAEVSICGSKFQCWDNATRGLDSATALEFIRALRTQAKMTRSSAVIAIYQCSQDAYDLFDKVSVLHEGYQIYFGRAKEAKQYFQDMGYVCPDRQTTADFLTAVTNPAERILNEDMVKAGKKIPLTAAEMEAHWKQSEAYKGLLQEIDYYSTHDQANNRQQLKEAHVAKQSKKARAQSPYTVSYGLQVKYLLIRNMQRIRNNMGITLFQVIGNGGMSFILGSMFYKALKHDDTAGFYSRAGALFFAVLFNAFSCMLEILALYEARPISEKHKRYSLYHPSADAMASVISEIPAKLLTSLTFNLAMYFLCNFKREAGAFFFYFLMTMVGTFAMSHIFRCLGASTKTYAESMVPASLLLLALAIYTGFAIPKTKILGWAKWIWYINPLSYIFESLMVNEFHGRQFKCSQFVPAGPGYENVSGTQRVCSAVGALPGEDYVSGERYINVAYNYYHSHKWRGLGIGLAYAIFFLGVYLAVTELNESAKQRGEILVFPQAVMRRMKKQRKLRAGTNANGSDIENTAGVATLNEKKMLEESSNSVASSSSMGDVKLSSSEATFHWKNVCFEVPIKKETRRILDNVDGWVKPGTLTALMGASGAGKTTLLDCLASRVTTGTITGDMFINGFLRDASFARSIGYCQQQDLHLQTATVRESLRFSAYLRQPSSVSKSEKEKYVEDVIKILEMETYADAVVGVAGEGLNVEQRKRLTIGVELAAKPKLLLFLDEPTSGLDSQTAWSICQLMRKLANHGQAILCTIHQPSALLMQEFDRLLFLQRGGKTVYFGDLGKGCQTMIDYFEKNGAHPCPAGANPAEWMLEVIGAAPGSHANQNYSEVWRNSSEYKAVQEELEWMEKELPKRPFDNSSEQTEFATSLVYQYTLVTKRLVEQYWRTPSYLWSKIGLTIISQIFIGFTFFKADNSMQGLQNQMLSIFMFSVIFNPTLQQYLPTFVAQRDLYEARERPSRTFSWVAFILSQITVEIPWNIIAGTIGFLVYYYPVGLYSTASKAGQLHERGALFWLYATAYYVFTGSMAQLCIAGQEVAEPAGQMASLLFTLSLSFCGVLVGPSSMPGFWKFMYRVSPLTYFVDGTLSTGIANGKVQCSDYELVKFKPANGMTCGEYMEPYIKLVGTGYLSDPSATDECRFCSVSTTNDYLSAVSSSYSRRWRNYGIFLVYIFFNFAMAVFIYWLARVPKKRNRVADERKTEAQKLVEK

SEQ ID NO: 989 - DNA, 4581 bp, Lachancea meyersii
  source 1..4581: mol_type = other DNA
atgtccttgggtactacccatttgccagaagctttggctgctaatcatgaagctgctgctgctacttctaacaattctgaaccagattctttccatccagagtacagaggttttgaagatcaagctcaagatcacgttagaaacttggctagaactttgactaatgcttctgctccaggttctgttgcttctatgtctccaatcaatccagttttctctactccagatgctccacattatgatgctagattggatcctaactccgacgaattttcttctgctttttgggttcacaacgtgtctcaattggttgctagagatccagatcattacaagccatattctttgggttgttcttggagaaacttgagagcttatggtaacgctactgatgttgcttaccaatctactgttgctaacttgccattgcaattggctgaaactgttttgagaatggctagaaaagctagaccagaagataccttcgatatcttgaaacctatggatggtttggttaagccaagagagttgttggttgttttgggtagaccaggttcaggttgttctactttgttgaaaactgtttccgctaacacccatggttttcatgttgatccaaagtctcaaatctcctacgatggtttgactccaaaagatgttgctagacattacagaggtgaagttgtttacaacgccgaatctgatgttcatttcccacatttgactgttttcgacaccttgaaaacagttgccagattgtcttgtccatccaacagaattcatggtgttgatagagaaaccttctctacccatattaccgaagttgctatggctacttatggtttgtctcataccagaaacactaaggtcggtaacgaattggttagaggtgtttcaggtggtgaaagaaagagagtttctattgccgaagtctctatttgcggttctaagtttcaatgttgggataatgctaccagaggtttggattctgctactgctttggaattcattagagctttgagaaccgaagctaagttgactcattctgctgctgttattgctatctaccaatgttctcaagatgcctacgatttgttcgataaggtttctgttttacacgagggttatcagatctatttcggtccagctaatcaagccaagcaatactttgaaactatgggttacgtttgcccatctagacaaactactgctgatttcttgactgctgttactaatccagctgaaagaattgtcagagaaggatgtagaccaccagctactgctgttgaaatggaaaagtattggaaacagtccccagattacaaaaggttgttgggtgaaattgatgaatacgctgctcatgaacaagccgataacatgagaaatttggccgaaaatcatgttgctaagcaatcaagaagggctagaccaaaatctccatacactgtttcttacggcttgcaggttaagtacttgttgatcagaaacatgcagaggatcagatccaatatgggtgtcactgttttccaagttattggtaatggttccatggcctttatcttgggttctatgttttacaaggtcttgaagcacgataccaccgaaggtttttattctagagctggtgctttgttcttcgccgttttgtttaatgctttctcctgcttgttggaaatcttcgcattatatgaagccagaccagtttctgaaaagcacaagagatacagcttgtatcatccatctgctgatgctatggcatccgttatttctgaagttccagctaagttattgacctccgtttcttttaacttggccttgtacttcttgtgcaactttaaaagagaagctggcgcctttttcttctacttcttgatgactatggttgccacgtttttgatgtcccatattttcagatgtttgggtgcttctactaagacctatgctgaatctatggttccagcttcagttttgttgttggctttgtctatctacaccggttttgctattccaaagaccaagattttaggttggtctaagtggatctggtacatcaatccattgtcctacgttttcgaatccttgatggttaacgaattccacgatagaagattcgattgctctgcttatattccaactggtccagcttacgaatctatctctggtactgaaagagtttgttctgctgttggtgctgttccaggtcaagattatgttaatggtgaaacctacatcaacgttgcctatggttattaccattctcataagtggcgtggtttaggtattggtttggcttatgctatagttttcttgggtgtttacttggccgttaccgaattcaatgaatccgctaaacaaaggggcgagattttagtttttccacaagctatcatgaggcgtatgaagaagcaaagacataggtccgaaaagaacaatggtggtggtgctagaggttctgaaactactggtggtggcggaggtggtggttctgctgcagatttggaatcttctgctggtgttgttcctgttaacgaaaagaagctattggaagattctaccgattctgccaattctaccaactcttctatgggtgaagctggtttaactcaatctgaagctatctatcattggaggaacgtttgtttcgatgtccccattaagaaagaaaccagaagaatcttggatcacgttgatggttgggtaaaaccaggtactttgactgctttgatgggtgcatctggtgctggtaaaactactttattggactgtttggcttctagagttaccactggtgttattactggtgacatgttcattaacggtttcttgagagattcctcattcgctagatctattggttactgtcaacaacaagacttgcacttggaaacttctaccgttagagaatctttgagattctccgcttatttgagacaaccatctcacatctctaagcaagaaaaggatagatacgtcgaagaagtcatcaggatcttggaaatgttgccatacgctgatgctgttgttggtgttgctggtgaaggtttgaatgttgaacagagaaaaagattgaccatcggtgttgaattagctgctaaacctaagctgttgctgtttttggatgaacctacttccggtttagattctcaaactgcttggtctatttgccagttgatgagaaagttagccaatcatggtcaagctattttgtgcaccattcatcaaccatcagctttgttgatgcaagaattcgataggttgctattcttgcaaagaggtggtaagactgtttactttggtgacttaggtccaggttgccaaactatgattgattactttgaatctcatggtgcccataagtgtccagatggtgctaatcctgcagaatggatgttggaagttataggtgctgctcctggtactcatgcttctcaaaattatcatgacgtttggaggaattccgatgaatatcgtgctgttcaagaggaattggaatggatggaacgtgaattgccaaagaagccaattgatacctctaacgaacagtctgaattctcgacttctttgttctaccaatactgtttggtcaccaagcgtttgttggaacaatattggagaactccatcttacctgtggtctaaaattggtttgaccatcatctcccaaatcttcatcggtttcactttcttcaaggccgattcttctatgcaaggcttgcaaaatcaaatgctgtccatcttcatgttcaccgttattttcaatccaaccttgcaacaatacctgccaacttttgtttctcagagagacttgtacgaagctagagaaagaccatctagaacattttcttggctggccttcattttgtcccagatttcagttgaaatcccctggaatattttggctggtactgttggtttcttcgtctactactttccagtcggtttttacaacaatgcttccttcgctgatcaattgcacgaaagaggtgctttattttggttgtacgctaccgctttttacgttttcactggttctatggcccaattggttattgcatctcaagaagttgctcaatccgctggtcaaatttcctctttgttgttcactatgtgcttgtctttctgcggtgttatggttcaacctaacaatatgcctagattctggattttcatgtaccgtgtttctccattgacctacttcatagatggtacattgtctaccggtttggcaaatgcagatgttcactgttctgattacgagatggttagttttactccaccacaaggtcaaacttgtggtcagtatatgcaatcctacatttcttcagctggtacaggttatttggctgatccagatgcaactgatgaatgtagattctgttctgtctcctctaccaacgattacttgaaagcagtttcttccgagtatacacatagatggcgtaactacggtatcttcctagctttcattatgttcaattttgctgccgccgtctttttctactggttggctagagttcctaagaagagaaatagagttgctgacgaaagaaaacccgaagctcaaaagattcaagagaagtaa

SEQ ID NO: 990 - protein, 1526 aa, Lachancea meyersii
MSLGTTHLPEALAANHEAAAATSNNSEPDSFHPEYRGFEDQAQDHVRNLARTLTNASAPGSVASMSPINPVFSTPDAPHYDARLDPNSDEFSSAFWVHNVSQLVARDPDHYKPYSLGCSWRNLRAYGNATDVAYQSTVANLPLQLAETVLRMARKARPEDTFDILKPMDGLVKPRELLVVLGRPGSGCSTLLKTVSANTHGFHVDPKSQISYDGLTPKDVARHYRGEVVYNAESDVHFPHLTVFDTLKTVARLSCPSNRIHGVDRETFSTHITEVAMATYGLSHTRNTKVGNELVRGVSGGERKRVSIAEVSICGSKFQCWDNATRGLDSATALEFIRALRTEAKLTHSAAVIAIYQCSQDAYDLFDKVSVLHEGYQIYFGPANQAKQYFETMGYVCPSRQTTADFLTAVTNPAERIVREGCRPPATAVEMEKYWKQSPDYKRLLGEIDEYAAHEQADNMRNLAENHVAKQSRRARPKSPYTVSYGLQVKYLLIRNMQRIRSNMGVTVFQVIGNGSMAFILGSMFYKVLKHDTTEGFYSRAGALFFAVLFNAFSCLLEIFALYEARPVSEKHKRYSLYHPSADAMASVISEVPAKLLTSVSFNLALYFLCNFKREAGAFFFYFLMTMVATFLMSHIFRCLGASTKTYAESMVPASVLLLALSIYTGFAIPKTKILGWSKWIWYINPLSYVFESLMVNEFHDRRFDCSAYIPTGPAYESISGTERVCSAVGAVPGQDYVNGETYINVAYGYYHSHKWRGLGIGLAYAIVFLGVYLAVTEFNESAKQRGEILVFPQAIMRRMKKQRHRSEKNNGGGARGSETTGGGGGGGSAADLESSAGVVPVNEKKLLEDSTDSANSTNSSMGEAGLTQSEAIYHWRNVCFDVPIKKETRRILDHVDGWVKPGTLTALMGASGAGKTTLLDCLASRVTTGVITGDMFINGFLRDSSFARSIGYCQQQDLHLETSTVRESLRFSAYLRQPSHISKQEKDRYVEEVIRILEMLPYADAVVGVAGEGLNVEQRKRLTIGVELAAKPKLLLFLDEPTSGLDSQTAWSICQLMRKLANHGQAILCTIHQPSALLMQEFDRLLFLQRGGKTVYFGDLGPGCQTMIDYFESHGAHKCPDGANPAEWMLEVIGAAPGTHASQNYHDVWRNSDEYRAVQEELEWMERELPKKPIDTSNEQSEFSTSLFYQYCLVTKRLLEQYWRTPSYLWSKIGLTIISQIFIGFTFFKADSSMQGLQNQMLSIFMFTVIFNPTLQQYLPTFVSQRDLYEARERPSRTFSWLAFILSQISVEIPWNILAGTVGFFVYYFPVGFYNNASFADQLHERGALFWLYATAFYVFTGSMAQLVIASQEVAQSAGQISSLLFTMCLSFCGVMVQPNNMPRFWIFMYRVSPLTYFIDGTLSTGLANADVHCSDYEMVSFTPPQGQTCGQYMQSYISSAGTGYLADPDATDECRFCSVSSTNDYLKAVSSEYTHRWRNYGIFLAFIMFNFAAAVFFYWLARVPKKRNRVADERKPEAQKIQEK

SEQ ID NO: 991 - DNA, 4470 bp, Hanseniaspora uvarum
  source 1..4470: mol_type = other DNA
atgtccgacaactccgaagtcgaatctttcaatgctaaacatgttgaagcttccggtggtactaaggatccatatactggtgttccagataccaactctgttcaatctttggctagaactttcacccatatgtctttggcttcatcctctaacgataacgaaatctatggtgttcctgttgatggtccagaaggtgttgaatcttataacgctaagatcgacccaaactctgaagaatttgatgctcatgcttggatgagaaacttgaacagattgagatctgctgatccagactactacaagaacatctctttaggtatggcttacaagaacttgtctgctttcggtgattcttccgatgttgtttatcaacctaccgtcttgaacgtgttccaaaaatccattgaggacatctacagaaaggttagaaaagctagaccatccgataagttcaccattttgaaacctatggacggtattttgaagccaggttctttgaatgttgttttgggtaaaccaggttctggttgttctactttgttgaaaaccttgtcctcttctaccttcggtttcgaagttaccaaggattccgttatttcctacgatggtattaccccaaaagagatcgaaaacaactacagaggtgatgttgtataccaaggtgaagttgatattcacttcccacatttgactgtgttcgaaaccttgaacaatgttgctttgttgactactccaaagaacaggattaagggtttgtccagagaagaattctccaaacatatggctgaagctactatggctatgtatggtttgtctcataccaagaacactaaggtcggtaacgaattggttagaggtgtttctggtggtgaaagaaaaagagtttccatctgcgaaatctcattggtcaatggtaagatcgtttgctacgataactctaccagaggtttggattctgcttctacattgtccttcatcaagtccttgaaaacccaatctaaagcttctgataccacttccgttgttgctatctatcaatgttctcaagatgcctacgatttgttcgataacgtcatcgttttggatgaaggttaccagttgtataacggtccatctaacaaagccaaggactactttattaagatgggttacgtttgcccagaaagacaaactactgctgatttcttgactgctgttacttctccaactgaaagaatcaagaataccgagatgatggaaaagggtatcaagattccagaaacctccttggaaatgtacgaatactggaatgcttccgaagaatgccaagaattgaagtccgaaatcgactactacttgtcccatatcgattcctcattgaaggatcaattccatcaagctcatactgcttctcaagctaaaagagctagaccttcttcttcttacttgttgacctttcaattgcaggtcaagtatttgttgcagagaaacttcactaggatcaagaacgatatcggcttgtctatgtttcaagtcttgggtaattctttcatggccttgattattgcctccatgttctacaaggttatgtactacactaacacctccacgttcttctatagaggtggtactttgttttacgccgtcttgtttaactccttctcctccttgttggaaatcatgacattatacgaagccaggccaattatcgagaagcaaaagaatttggcaatgtaccatccatctgctgaagccgtttcttctattttgtctgaaatgccagccaagattattaccgctattgccttcaatatgttctactactggatgaccaatttgaagagagatgctggcgctttctttttctacttgctgatgaatttcgtttgcctgttggctatgtctcacatctttagattcattggttctgccactaagtcttttccaggtgctatggttccagcttctgttattttgttgggtatttctatgtacgccggtttcgctattccaaagacttctatgttaggttggtctaagtggatctactggattaacccaattcaatacggtttcgagtccttgatgatcaacgaatttcatggtgtcgaatacccatgctcatcttatattccatctggtactggttactccgattttgattcagcttacaaaacctgctctgttgttggtgctgttccaggttcagatattgtctctggtgatttgttcctgaagttgtcttatggttacgaacattctcataagtggcgtggttttggtgttgttttagcttacgctattttcttcttcggtgtctacttgactttcaccgagtataatgaatccgctaagcaaaagggtgagatcattgtctttccacaagctgttgttcgtaagatcaagaagatgtctaagtctacccacgatttggaatcagcttcagcatctgatgaatcttacaccgacaaaaagttggtttccgatgattacgatgaatcccaagattcctacaacgatgttggtttgagtgaatccgaagctactttacattggagagatttgtgttacgacgtccaaatcaaaggtgaaactagaaggatcttgaacaacgtagatggttgggttgctaagaactctattactgctttgatgggttcttctggtgctggtaaaactactttgatggattgcttggcttctagagttaccatgggtgttattaccggtgatattttggttaacggtagattgagagatgagggtttcccaagatctattggttactgtcaacaacaagacttgcatttggctactgctactgttagagaatccttgaaattctccgcttacttgagacaaccagcctctgtttctaaagaagagaaagacgcttacgtcgaatccgtcattaagatcttggatatgcaaagatacgctgatgctgttgtaggtgtaatgggtgaaggtttgaacgttgaacaaagaaaacgtttgaccatcggtgtagaattggctgctaaacctaagctgttgatgttcttagatgaacctacttctggtttggactctcaaactgcttggtctatttgtcagttgatgagaaagttggctaaccatggtcaagctattttgtgcactattcatcaaccatccgccatgttgattgatcagtttgataggttgctgttcttgcagaaaggtggtaagactgcttattttggtgacttaggtgagggttgtaagaccatgattgattactttgaatctaagggtgctccaaagtgtccaccaaatgctaatccagctgaatggatgttggatattgtccaagctagagattatcatgaagcctggaaatcttcagacgagtacaaacaagttcatgctactttggacgaaatggaaagagaattgccaaacatcgttatctccaacgctgatgatacttctgcttttgctgcttcatttccagtccaactgttttacgtttacaagagagtcgtccaacaatattggagaactccaatctatttgtgggccaagtttttcgttactggtgcttctgagttgttcatcggttttactttctttaaggccaaccacacattgcagggtttgaagaatcaaatgttggccatcttcatgttcgtcgtcatttttaacccattcttgcaacagtacttgccaatctttactcaacagagagacttgtacgaagctagggaaagaccatctagaacattttcttggtacgctttcttgatcggtcaaatgttagctgaaatcttcccaaacattttgtgtgccatcttgggctttttctgtttttactacccaattggtttcgcctctaacgcttcttattctggtcaattggttgagaagtctggcctgtttttcttctactccttgattttcttcacctggattggttctacagcattgatggttgcagctccatttgaagatcctcaagctggtggtcatttggccaatttgatgtttacaatggccttgtctttcaacggtgtttttgttggtccaggtaaattgccaggtttttggaagtttatgtaccgtgtttctccattgacctacttcgttgatggtgctttgtctataggtttgtccgataacaaggttgaatgctctcaatacgagtacactgatgttcaattgccagctggtatgacttgtggtgaatatttgtctccttacatcgagaaggttggtacaggttacattttggataagaacgctacctctgaatgcaagatgtgtcaaatttctactaccaacgccttcttgaccactgtttcatctaaatattctaggcgttggcgtaacctgggtattttcattgcttacattgctttcaactacgtgatggccatgttcttatattggtgggctagagttccaaagaaggctaacagagtttctgacgaaaaagactcttccaaggataagaaggacgagaagaagtag

SEQ ID NO: 992 - protein, 1489 aa, Hanseniaspora uvarum
MSDNSEVESFNAKHVEASGGTKDPYTGVPDTNSVQSLARTFTHMSLASSSNDNEIYGVPVDGPEGVESYNAKIDPNSEEFDAHAWMRNLNRLRSADPDYYKNISLGMAYKNLSAFGDSSDVVYQPTVLNVFQKSIEDIYRKVRKARPSDKFTILKPMDGILKPGSLNVVLGKPGSGCSTLLKTLSSSTFGFEVTKDSVISYDGITPKEIENNYRGDVVYQGEVDIHFPHLTVFETLNNVALLTTPKNRIKGLSREEFSKHMAEATMAMYGLSHTKNTKVGNELVRGVSGGERKRVSICEISLVNGKIVCYDNSTRGLDSASTLSFIKSLKTQSKASDTTSVVAIYQCSQDAYDLFDNVIVLDEGYQLYNGPSNKAKDYFIKMGYVCPERQTTADFLTAVTSPTERIKNTEMMEKGIKIPETSLEMYEYWNASEECQELKSEIDYYLSHIDSSLKDQFHQAHTASQAKRARPSSSYLLTFQLQVKYLLQRNFTRIKNDIGLSMFQVLGNSFMALIIASMFYKVMYYTNTSTFFYRGGTLFYAVLFNSFSSLLEIMTLYEARPIIEKQKNLAMYHPSAEAVSSILSEMPAKIITAIAFNMFYYWMTNLKRDAGAFFFYLLMNFVCLLAMSHIFRFIGSATKSFPGAMVPASVILLGISMYAGFAIPKTSMLGWSKWIYWINPIQYGFESLMINEFHGVEYPCSSYIPSGTGYSDFDSAYKTCSVVGAVPGSDIVSGDLFLKLSYGYEHSHKWRGFGVVLAYAIFFFGVYLTFTEYNESAKQKGEIIVFPQAVVRKIKKMSKSTHDLESASASDESYTDKKLVSDDYDESQDSYNDVGLSESEATLHWRDLCYDVQIKGETRRILNNVDGWVAKNSITALMGSSGAGKTTLMDCLASRVTMGVITGDILVNGRLRDEGFPRSIGYCQQQDLHLATATVRESLKFSAYLRQPASVSKEEKDAYVESVIKILDMQRYADAVVGVMGEGLNVEQRKRLTIGVELAAKPKLLMFLDEPTSGLDSQTAWSICQLMRKLANHGQAILCTIHQPSAMLIDQFDRLLFLQKGGKTAYFGDLGEGCKTMIDYFESKGAPKCPPNANPAEWMLDIVQARDYHEAWKSSDEYKQVHATLDEMERELPNIVISNADDTSAFAASFPVQLFYVYKRVVQQYWRTPIYLWAKFFVTGASELFIGFTFFKANHTLQGLKNQMLAIFMFVVIFNPFLQQYLPIFTQQRDLYEARERPSRTFSWYAFLIGQMLAEIFPNILCAILGFFCFYYPIGFASNASYSGQLVEKSGLFFFYSLIFFTWIGSTALMVAAPFEDPQAGGHLANLMFTMALSFNGVFVGPGKLPGFWKFMYRVSPLTYFVDGALSIGLSDNKVECSQYEYTDVQLPAGMTCGEYLSPYIEKVGTGYILDKNATSECKMCQISTTNAFLTTVSSKYSRRWRNLGIFIAYIAFNYVMAMFLYWWARVPKKANRVSDEKDSSKDKKDEKK

SEQ ID NO: 993 - DNA, 4524 bp, Lachancea lanzarotensis
  source 1..4524: mol_type = other DNA
atgtctttgggtacttcccatgttccagaagctttggctgctgaattggaagctgttagaaatagggatgaatcttcttcaaccgccgaaaagtatgaaggtttggattctcatgctaaggattccgttagagatttggctagatctttgactcatgaaggtgctgctgctgcagatggttctgaatctccagttaatccagttttctctgatccaaatgctccagattatgatgctagattggacccaaattccgacgaattttcttctgctttttgggtcagaaacttgtccgaattggttagacaagatccagatcactacaagccatattctttgggttgttcttggagaaacttgagagcttatggtaacgctactgatgttgcttaccaatctaccgttgttaacatcccagttcaattggttgaaaccgtttacagaatggctagaaaagctagaccagaagataccttcaacatcttgaaacctatggatggtttggttaagccaagagagttgttggttgttttgggtagaccaggttctggttgttctactttgttgaaaactgtttccgctaacacccatggttttcatgttgatccagaatccagaatttcctacgatggtttgtctccaaaagaagttgccaaacattacagaggtgaagttgtttacaacgccgaatctgatgttcatttcccacatttgactgttttccagaccttaaagactgttgcaagattggcttgtccatccaatagaattcatggtgttgatagagaagccttctccactcatattactgaagttgctatggctacttacggtttgtcacatacaagaaacactaaggtcggtaacgaattggtaagaggtgtttctggtggtgaaagaaagagagtttctattgccgaagtttccatttgcggttctaagtttcaatgttgggataatgctactagaggtttggactctgctactgctttggaattcattagagctttgagaacccaagctaagttgactgcttctgctgctgttattgctatctaccaatgttctcaagatgcctacgatttgttcgataaggtttctgttttacacgagggttaccaaatctattttggtccagctaaagatgctaaggcctactttgaaagaatgggttatgtttgtgctccaagacaaactactgctgattttgttactgctgttaccaatccagctgaaagacaagttagagctggtgctagaccaccagcttcagctgttgatatggaaacatattggaagcagtctccagaatatgctcaactgttacaagatatcgatgaatacgaagcctctggtggtaactctaaagaacaattggctgctaatcatgtcgctaagcaatctagaagggctagagctgcttctccatatactgcttcattttggttgcaggtcaagtacctgttgatcagaaacatgcaaagaatcaggtccaatatgggtgtcactgcttttcaagttattggtaatggttccatggctttcatcttgggttccatgttttacaagattctgaagcacgataacaccgctggtttttattctagagccggtgctttgtttttcgccgttttgtttaatgctttctcgtgcatgttggaaatcttggcattatatgaagccaggccaatttctgaaaagcacaagagatacagcttgtatcatccagctgctgatgctatggcatctgttattagtgaaattccagccaagttggttacctctgttgcttttaacttggccttgtacttcttgtgtaacttcaaaagagaagctggcgctttcttcttctacttcttgatgactatggttgccacgtttttgatgtcccatattttcagatgtttgggtgcttctactaagacctatgctgaatctatggttccagcatctgttttgttgttgggtttagctatctacaccggttttgctattccaaagaccaagattttaggttggtctaagtggatctggtacatcaatccattgtcctacgttttcgaatccttgatggttaacgaattccacggtagaagatttgcttgctatgcttatattccaactggtccaggttacttggatgttactggtactgaacatgtttgttctgcagttggtgctgttccaggtcaaaattatgttgatggtgaaacctacatcaacgttgcttatggttattaccatgctcataagtggcgtggtttaggtattggtttggcttacgctatctttttcttgggtgtttacttggccgttgtcgaattcaatgaatctgctaaacaaaggggtgagatcttggtttttccacattgggctatggcaagaatgaagaagcaaagaagattgagagctgctggtgctgatcctgctgatgaagaacatggtggtgcttcatctggtactactgaaaagaaaatgttggaagattccgccgaagatgatgatgcttccgctggtgcttctgccgatgctggtttgttgtcatcttctaatgctatctttcattggaggaacgtttgcttcgatgttgccattaagaaagaaaccagaagaatcttggatcacgttgatggttgggtaaaaccaggtactttaactgctttgatgggtgcatctggtgctggtaaaactactttattggattgcttggcctctagagttactactggtgttattactggtgacatgttcatcaacggtttcttgagagatgcttctttcgctagatctattggttactgtcaacaacaagacttgcatttggaaactgccactgttagagaatctttgagattctctgcttacttgagacaaccagatcacgtttccattcaagacaagaactcttacgttgacgatgtcattaggatcttggagatggaaaagtacgctgatgctgttgttggtgttgctggtgaaggtttaaacgttgaacaaagaaaaaggttgaccatcggtgttgaattagctgctaaacctaagctgttgctgtttttggatgaacctacttccggtttagattcacaaactgcttggtctatttgccagttgatgagaaagttggcaaatcatggtcaagctattttgtgcaccattcatcaaccatcagctttgttgatgcaagagtttgataggttgctgttcttgcaaagaggtggtagaactgtttacttcggtgaattaggtgctggttgtcaaaccatgattgactacttcgaatcacatggttcacataagtgtccatcaggtgctaatccagcagaatggatgttagaagttatcggtgctgctcctggtactcatgctgctcaagattataatgaagtttggaggaattccgatgagtacagagctgttcaagaggaattggaatggatggaaagagaattgcctaatagaccagccgttgatacttcttctgaacagtctgaattttccacctccttggtttaccaatactctttggttactcacaggttgttgcagcaatattggagaactccatcttacttgtggtctaaggttggtttgaccattatctcccagttgtttattggtttcaccttcttcaagtccgactcttctatgcaaggtctgcaaaatcaaatgctgtccatttttatgttcgccgtcatttttaacccaaccttgcagcagtacttgccaacatttgtttctcaaagagacttgtacgaagccagagaaagaccatctagaactttttcatgggttgccttcatcttgtcccaaattactgttgaaatcccctggaatattttcgctggtacaattggtttcttggtctactattacccagtcggtttttactctaacgcttcttatgctggtcaattgcacgaaagaggtgctttattctggttatacgctaccgctttttacgttttcactggttctatggcccaattagttgttgccggtcaagaagtcgctcaagcagcaggtcaaattgcttctttgttgtttaccctgtctttgtctttctgtggtgttatggttcaaccttacaatatgccaggtttctggattttcatgtacagagttagtccactgacctactttatcgatggtgcattgtctactggtattgctaatgctaaagttcattgcgccgattacgaaatggttaggtttactccaccacaaggtcaaacatgtggtcagtatatgcaaccatatattactgctgctggcactggttacttgaaagattctggtgctacagatgaatgccaattctgttctgtttctactaccaacgattacttgaaggccgtttcttcatcttattctcatagatggcgtaactacggtattttcttggccttcattatgttcaattttgctgctgccgttttcttttactggttggctagagttccaaagaagagaaatagagttgctgacgaaagaaagtccgatgctcaaaagttgaaagagaagtaa

SEQ ID NO: 994 - protein, 1507 aa, Lachancea lanzarotensis
MSLGTSHVPEALAAELEAVRNRDESSSTAEKYEGLDSHAKDSVRDLARSLTHEGAAAADGSESPVNPVFSDPNAPDYDARLDPNSDEFSSAFWVRNLSELVRQDPDHYKPYSLGCSWRNLRAYGNATDVAYQSTVVNIPVQLVETVYRMARKARPEDTFNILKPMDGLVKPRELLVVLGRPGSGCSTLLKTVSANTHGFHVDPESRISYDGLSPKEVAKHYRGEVVYNAESDVHFPHLTVFQTLKTVARLACPSNRIHGVDREAFSTHITEVAMATYGLSHTRNTKVGNELVRGVSGGERKRVSIAEVSICGSKFQCWDNATRGLDSATALEFIRALRTQAKLTASAAVIAIYQCSQDAYDLFDKVSVLHEGYQIYFGPAKDAKAYFERMGYVCAPRQTTADFVTAVTNPAERQVRAGARPPASAVDMETYWKQSPEYAQLLQDIDEYEASGGNSKEQLAANHVAKQSRRARAASPYTASFWLQVKYLLIRNMQRIRSNMGVTAFQVIGNGSMAFILGSMFYKILKHDNTAGFYSRAGALFFAVLFNAFSCMLEILALYEARPISEKHKRYSLYHPAADAMASVISEIPAKLVTSVAFNLALYFLCNFKREAGAFFFYFLMTMVATFLMSHIFRCLGASTKTYAESMVPASVLLLGLAIYTGFAIPKTKILGWSKWIWYINPLSYVFESLMVNEFHGRRFACYAYIPTGPGYLDVTGTEHVCSAVGAVPGQNYVDGETYINVAYGYYHAHKWRGLGIGLAYAIFFLGVYLAVVEFNESAKQRGEILVFPHWAMARMKKQRRLRAAGADPADEEHGGASSGTTEKKMLEDSAEDDDASAGASADAGLLSSSNAIFHWRNVCFDVAIKKETRRILDHVDGWVKPGTLTALMGASGAGKTTLLDCLASRVTTGVITGDMFINGFLRDASFARSIGYCQQQDLHLETATVRESLRFSAYLRQPDHVSIQDKNSYVDDVIRILEMEKYADAVVGVAGEGLNVEQRKRLTIGVELAAKPKLLLFLDEPTSGLDSQTAWSICQLMRKLANHGQAILCTIHQPSALLMQEFDRLLFLQRGGRTVYFGELGAGCQTMIDYFESHGSHKCPSGANPAEWMLEVIGAAPGTHAAQDYNEVWRNSDEYRAVQEELEWMERELPNRPAVDTSSEQSEFSTSLVYQYSLVTHRLLQQYWRTPSYLWSKVGLTIISQLFIGFTFFKSDSSMQGLQNQMLSIFMFAVIFNPTLQQYLPTFVSQRDLYEARERPSRTFSWVAFILSQITVEIPWNIFAGTIGFLVYYYPVGFYSNASYAGQLHERGALFWLYATAFYVFTGSMAQLVVAGQEVAQAAGQIASLLFTLSLSFCGVMVQPYNMPGFWIFMYRVSPLTYFIDGALSTGIANAKVHCADYEMVRFTPPQGQTCGQYMQPYITAAGTGYLKDSGATDECQFCSVSTTNDYLKAVSSSYSHRWRNYGIFLAFIMFNFAAAVFFYWLARVPKKRNRVADERKSDAQKLKEK

SEQ ID NO: 995 - DNA, 4560 bp, Torulaspora globosa
  source 1..4560: mol_type = other DNA
atgggtttgccagaagaaccacaagataactcttcaggttcttcagatgttccagtttacaatggtttcgatgttaaggcccaagaaaaggttagacaattggctagaactttgaccgaacaatctgcttctggttctattggtgctggtggtcatactgctgatgatggtgctgttgttgaaagaggtgacgctcaatctttgttctctgttagatctagagctggtgttaacccagtttttgatggtgaatctgatgctcaatacgatgctagattggatcctaagtctgacgaatttgtttctgcccaatggatcaagaacatgtccagattgtctcatgaagatccagattacttcaagccatactctttggattgctgttggagagatttgtctgcttcaggtgcttctgctgatgttgcttatcaatctacttttgttaacgccccaaagaagtatttgggtcaagcttatagagctattaccccagctaaagaagtcaacagattcgaaattttgaagccaatggacggtttgttgaacccaggtgaattattggttgttttgggtagaccaggttctggttgtactactttgttgaagtccatttcctctaacacccatggtttcaagatctccaaagaatcccatgtttcctacaagggtatttccccaagagatattaacaagcacttcagaggtgaagttgtttacaacgctgaagccgatattcatttgccacatttgactgtttaccagaccttgttgactgttgccagattgaaaactccagctaatagagttaagggtgtttctagagaagcttgggctcatcatatgactgaagttgctatggctacttatggtttgtctcataccagaaacactaaggttggtaacgatattgtcagaggtgtttcaggtggtgaaagaaagagagtttctattgctgaagtcgctatttgcggttctaagtttcaatgttgggataacgctactagaggtttggattctgctactgctttggaatttgttagagccttgaaaacccaagctgatattgctaatactgctgctgctgttgcaatctaccaatgttctcaagatgcttacgatttgttcgataaggtttgcgttttggatggtggttaccaaatctattttggtccagctaaggatgctaagaggtactttcaagaaatgggttacgtttgcccagatagacaaactacagctgatttcttgactgctgttacttctccagctgaaagaatcgtcaatgaagagttcattaagaagggtatcagagtcccacaaactccaaaagaaatgtccgattattggaggaactcttccgagtacagaaagttgattgctcaaattgatgccaagatggccgaaaacgatgaagaagaaagagtcaggatcaaagaatctcatatcgcctctcaatctaagagagctagagcttcttctccttacatggtttcttatatgatgcaggtcaagtacctgctgattagaaacgtttggagaatcagaaactcctccgctattgctttgttccaagttattggtaactccgttatggccttgattttgggttctatgttctaccaagttatgaagggtgattctactgctaccttctactttagaggttctgctatgttctttggcttgttgtttaacgccttctcatccttgttggaaatcttctcattatacgaagccagaccaattaccgaaaagcacagaacttattccttgtaccatccttcagctgatgcttttgcttctgttttgtctgaaatccccactaagttgatgaccgctgtttgtttcaacatcatcttctacttcatggtcaacttcagaagaaacgctggtagattctttttctacttcctgattaacatcgttgccaccttcactatgtctcatttgtttagatgtgtcggctctttgactaagactttatctgctgctatggttccagctgcaatgttgttgttggctttggctatttttactggtttcgctgttccagagactaagatgttaggttggtctaagtggatttggtacatcaacccattgtcctacttgttcgaatccttgatggttaacgaattccacggtagagaatttccatgtgctcaatttgttccatcaggtccagcttaccaaaacattactggtactgaaagagtttgttccgctgttggttcaattccaggtgcatcttcagttttgggtgatgactttttgaaaacctcctacaactactacaacaagcacaagtggcgtggttttggtgttggtatggcttatgctattttctttttcgccgtgtacttgttcttggccgaagttaatcaaggtgctaagcaaaacggtgagattttggtttttccattgtccgttgtcagaaggttgaaaaagcaaaagaagttgtctcagccaaactccggtggtgatattgaaaaaggttcaggtattgcttctaccgttaccgatagaaagttgctgcaagattcttccgaatctttgacctctagtgaagatgacgttggtttgtcaaagtctgatgccatttttcattggagggacttgtgttacgaagtccagatcaagaaagaaaccagaaggatcttgaacaacgttgatggttgggttaagccaggtactttgactgctttgatgggtgcatcaggtgctggtaaaactactttattagattgcttggcagaaaggaccactatgggtgtcattacaggtaacattttcgtcaacggtaacttgagggatgaatctttcccaagatctattggttactgtcaacaacaagacttgcatttgactaccgctactgttagagaaagcttgaagttttctgcctacttgagacaaccagcttctgttccaactgaagaaaaagatagatacgtcgaagaagtgatcaaggtcttggaaatggaaacttatgctgatgcagttgttggtgttgctggtgaaggtttgaatgttgaacaaagaaagcgtttgaccatcggtgttgaattggttgctaaaccagctttgcttgttttcttggatgaacctacatctggtttggatagtcaaactgcttggtctatttgccagctgatgaagaaattggctaaccatggtcaagctattttgtgcactattcatcaaccatccgctatgttgatgcaagaatttgataggctgttgttcttgaaaagaggcggcgaaactgtttactttggtgaattaggtgatggttgccataccatgattgactactttgaaagaaacggtgctcataagtgtccaccagatgctaatccagcagaatggatgttggaagttgtaggtgctgctccaggttctcatgctaatcaagattatcatcaagtctggcgttcatccgatgagtacaaagctgttagacaagaattggaccaaatggaaagagaattgccaaacaagactacctctttgatggacgattccgagaaacataagtcttatgctaccccactgttctatcaaatcaagttggtttgcttgaggttgttccaacagtattatagatctccaggttacttgtgggctaagttcgctttgaccattttcgataacttgttcatcggtttcactttcttcaaggccgatagatcattgcaaggtctgcaaaatcaaatgctgtccattttcatgttcaccgtcctgtttaacaacttgttgcagcaatacttgcctttgttcgttcaacagagaaacttgtacgaagctagggaaagatcttccagagtttttagttggaaggctttcattgtctcccaaatcgttgtagaagtcccatggaatattttggctggtactttggcttacctgatctattactatgccgttggtttttactctaatgcttcagctgctggtcaattgcatgagagaggtgctttgttttggttgttctctatcggtttctacgtctacattggttctatgggcgttttgtgcatttcctttatggaattggctgaaactgctgctaatttggcttctttgttgttcaccatgtgtttgtctttctgcggtgttatggttactaaggatgtcattccaaggttttggatctttatgtacagatgcaaccccttgacttacttgattgaagctttcttggcattgggtattgctaacgttaatgtcacctgttccgattacgaattgattaagtttactccagtgccaggtcaaacttgtggtgagtatatggctccatatattcaaaaagctggtactggttacttgcaagacccaaatgctactgatgtttgtcagttctgtcaattctcctacaccaacgatttcttggctacattgggttgtaaatactctcatagatggcgtaactacggtatcttcatctcctttatcgttttcaactatgttgccgccgttttcttctactggttggctagagaacctaaatctaagggtaagatctgcaaaaagaaagaagagaagtccaagaagtaa

SEQ ID NO: 996 - protein, 1519 aa, Torulaspora globosa
MGLPEEPQDNSSGSSDVPVYNGFDVKAQEKVRQLARTLTEQSASGSIGAGGHTADDGAVVERGDAQSLFSVRSRAGVNPVFDGESDAQYDARLDPKSDEFVSAQWIKNMSRLSHEDPDYFKPYSLDCCWRDLSASGASADVAYQSTFVNAPKKYLGQAYRAITPAKEVNRFEILKPMDGLLNPGELLVVLGRPGSGCTTLLKSISSNTHGFKISKESHVSYKGISPRDINKHFRGEVVYNAEADIHLPHLTVYQTLLTVARLKTPANRVKGVSREAWAHHMTEVAMATYGLSHTRNTKVGNDIVRGVSGGERKRVSIAEVAICGSKFQCWDNATRGLDSATALEFVRALKTQADIANTAAAVAIYQCSQDAYDLFDKVCVLDGGYQIYFGPAKDAKRYFQEMGYVCPDRQTTADFLTAVTSPAERIVNEEFIKKGIRVPQTPKEMSDYWRNSSEYRKLIAQIDAKMAENDEEERVRIKESHIASQSKRARASSPYMVSYMMQVKYLLIRNVWRIRNSSAIALFQVIGNSVMALILGSMFYQVMKGDSTATFYFRGSAMFFGLLFNAFSSLLEIFSLYEARPITEKHRTYSLYHPSADAFASVLSEIPTKLMTAVCFNIIFYFMVNFRRNAGRFFFYFLINIVATFTMSHLFRCVGSLTKTLSAAMVPAAMLLLALAIFTGFAVPETKMLGWSKWIWYINPLSYLFESLMVNEFHGREFPCAQFVPSGPAYQNITGTERVCSAVGSIPGASSVLGDDFLKTSYNYYNKHKWRGFGVGMAYAIFFFAVYLFLAEVNQGAKQNGEILVFPLSVVRRLKKQKKLSQPNSGGDIEKGSGIASTVTDRKLLQDSSESLTSSEDDVGLSKSDAIFHWRDLCYEVQIKKETRRILNNVDGWVKPGTLTALMGASGAGKTTLLDCLAERTTMGVITGNIFVNGNLRDESFPRSIGYCQQQDLHLTTATVRESLKFSAYLRQPASVPTEEKDRYVEEVIKVLEMETYADAVVGVAGEGLNVEQRKRLTIGVELVAKPALLVFLDEPTSGLDSQTAWSICQLMKKLANHGQAILCTIHQPSAMLMQEFDRLLFLKRGGETVYFGELGDGCHTMIDYFERNGAHKCPPDANPAEWMLEVVGAAPGSHANQDYHQVWRSSDEYKAVRQELDQMERELPNKTTSLMDDSEKHKSYATPLFYQIKLVCLRLFQQYYRSPGYLWAKFALTIFDNLFIGFTFFKADRSLQGLQNQMLSIFMFTVLFNNLLQQYLPLFVQQRNLYEARERSSRVFSWKAFIVSQIVVEVPWNILAGTLAYLIYYYAVGFYSNASAAGQLHERGALFWLFSIGFYVYIGSMGVLCISFMELAETAANLASLLFTMCLSFCGVMVTKDVIPRFWIFMYRCNPLTYLIEAFLALGIANVNVTCSDYELIKFTPVPGQTCGEYMAPYIQKAGTGYLQDPNATDVCQFCQFSYTNDFLATLGCKYSHRWRNYGIFISFIVFNYVAAVFFYWLAREPKSKGKICKKKEEKSKK

SEQ ID NO: 997 - DNA, 4446 bp, Debaryomyces hansenii
  source 1..4446: mol_type = other DNA
atgaacagctctacccactacgatgatgtctctcaaaaatcttctaccgttaacgattccgccgatgataacaaaattccagaataccatggtttcgacaaagaggtttcttctgaagttcaaaatttggccagaatgatgtccagaccttctattgataaggcttcttcattggctagaaccctgtctaatatgtctcaagttccaggtttgaatccaatggctaaagatgaaggtgaattggacccaagattggatccagattctgattctttcgattctaagttctgggtcaagaacttgaggaagatgcataattctgatccagcttactacaagccagcttctttgggtgttgcttacaaagatttgagagcttacggtattgctaccgatgctgattatcaagctaatgttggtaacgttgtctacaagaccatttctcaaaccatcaagggtttcttcgataagaacaacgatgatgccaagttcgatatcttgaaacctatggacggtttgattagaccaggtgaagttactgttgttttgggtagacctggtgctggttgttctacattcttgaaaaccatttcttctaacacccacggtttcactgttgctaaagattctgttttgtcctacgacggtttaaagccaaacgatatcattaagcacttcagaggtgatgttgtttactgtgctgaaaccgaatctcatttcccacaattgactgttggtcaaactttggattttgctgctaagttgagaacccctcaaaacagaccagaaggtgtttctagagaagaatatgctgctcatatgaccaaggttattatggctacttatggtttgtcccataccagaaataccaaggttggtaatgatttcatcagaggtgtttcaggtggtgaaagaaagagagtttctattgctgaagttgctttgtccttcgcttctttacaatgttgggataactctaccagaggtttggattctgctactgctttggaattcattaaggctttgaaaacctctgccactgttttgaatgctactccaatgattgctatctaccaatgctctcaagatgcctacgatttgttcgataaggtcatcttgttgtacgaaggttaccaaattttcttcggtgattgcaagcaagccaagttgtactttttggaaatgggttacgattgcccacaaagacaaactactgctgatttcttgacctctttgactaacccatctgaaagagttgtaagaccaggttacgaaaacaaggttccaagaacaccagaagaattctacacttactggcaaaactctccagaaagaaaagctttgttgggtgaaatcgatgactacttgaacaagaccgataacgaagaaagattgcaacaattcaaggatgcccataacaccaagcaatctaatcacttaagaccagcttctccatacactgtctcttacggtttacaagtcaagtacatcatgggcagaaacattatgagaactaagggtgatccatccatcaccttgttctctatttttggtaacaccgtcatgggcttgatcatctcttctattttctacaatttggacgacaccaccggttctttttactatagaacagttgctatgtttttcgccgttttgttcaacgctttctcctccttgttggaaatttttgccttgtatgaagccagaccaatcgttgaaaaacacaaaacttatgccctgtaccatccatctgctgatgcttttgcttctattattactgagttgccaccaaagctgctggtttctatttcttttaacttggtgctgtacttcatggtcaactttagacgtaatgctggcaacttcttcttctacttgttggttaatttcaccgccaccttgtctatgtctcatttgtttagaactattggctccgctaccaagtctttgtctcaagctatgactccagcttcagttttgttgttggctttgactattttcaccggtttcgttattccaactccagaaatgttaggttggtgtagatggatcaattacttggatcctattggttacgctttcgaagctttgattgctaacgaattccatggtagagatttcgactgttctcaatttgttccatctggtccaggttatccaacttctggtaactctattatctgctccgttgttggttcacaaccaggttctgatatagttaacggtgatgactacattaggggttcttacgagtactacttttctcatagatggcgtaattggggtattgtcgttggtttcgttgttttcttcttgttcgttcacattatcatctgcgagtacaacaaaggtgctatgcaaaagggtgagatcctgttgtttcaaagatctgctttgaagaagaacaagagacaacgtaaggatatcgagtccggtaacattgaaaaagttggtccagaattcaacaacgagaaaaccccagataacgaaatcgataacaagttgccatcctccggtgatatttttcattggagagaattgacctaccaggtcaagattaagtccgaagatagagtcatcttgaactctgttgatggttgggttaagcctggtcaagttactgctttaatgggtgcttcaggtgctggtaaaactactttgttgaatgccttgtctgacagattgacctctggtgttattacttcaggtgtcagaatggttaatggtcacgaattggatgcttcgttccaaagatcaatcggttacgttcaacaacaagacttgcacttgcaaacctctactgttagagaagccttgactttttctgcctatttgagacaacctaagtctgtcccaaaatccgaaaaggattcttacgttgattacatcatcaggttgttggagatggaaaagtactctgatgctgttgttggtgttagtggtgaaggtttaaatgtcgaacagagaaaaagattgaccatcggcgttgaattggttgctaaacctaagttgttggtctttttggatgaacctacatctggtttggatagtcaaactgcttggtctatctgcaagttgattagaaagttggctgatcacggtcaagctattttgtgtactattcatcaaccatccgccatcctgttgaaagaatttgatagactgttgttcttgcagagaggtggtaagactgtttactttggtgatttgggtgataactgccaaaccttgattgactactttgaaaagtacggtgctccaaaatgtccaccagatgctaatccagctgaatggatgttggaagttattggtgctgctccaggttctcatgcttcacaagattattatgatgtctggatgaactccaccgagtacagagaagttaagggtgaattagatgtcatggaacaagagttggtgaaaaagccaaaagacgattctccagaatctatgaagactttcgctgttccaatgtggcaacagtacattaacgttactcatagagtcttgcagcagtattggagaactccatcttatacctactccaaggttttgatgtccatcttctcgtctttgtttaacggtttcgctttcttcaaggctaacaacactatgcaaggcttgcaaaatcaaatgttctccgtgttcatgttcttcgtcattttcaacactttgacccagcaatacttgcccaactatgtttctcaaagagacttatacgaagccagagaaagaccatctaaaaccttttcttgggttgctttcattaccgctcaaattacagctgaaatcccatggcaaatattgactggtactttggctttcttctgttggtattatccaattggcttgtacggtaatgctgaagctactgatactgtttcacaaaggggtgctttgatgtggattatcatcgtcttgtttttcatctactgctccactatggctcaattgtgcatttcctttatggaagttgctgataacgctgctaatttggcctctttgttgttcactatgtgtttgactttctgcggtattttggcttctccagatgcaatgccaggtttctggatttttatgtacagatgcaaccccttctcctacttggtttctgctattttatctgttgccttgcaggattcctctgttacttgttctgacaaagaactgttgagattcgaacctgaaggtggtcaaacatgtggtgagtatatgcaatcttacatccaaaatgctggtggctacttgatctctaatgatacaactggttcttgcgaatactgcactatctcttccactaacgttttcttggaatccgtttctgttgacaagaccaagagatctagagatatcggtattttcttctgcttcatcgtcatcaacatgattggcaccgttttcttttattggttggctagagttcctaagaggtccagacaaaagtaa

SEQ ID NO: 998 - protein, 1481 aa, Debaryomyces hansenii
MNSSTHYDDVSQKSSTVNDSADDNKIPEYHGFDKEVSSEVQNLARMMSRPSIDKASSLARTLSNMSQVPGLNPMAKDEGELDPRLDPDSDSFDSKFWVKNLRKMHNSDPAYYKPASLGVAYKDLRAYGIATDADYQANVGNVVYKTISQTIKGFFDKNNDDAKFDILKPMDGLIRPGEVTVVLGRPGAGCSTFLKTISSNTHGFTVAKDSVLSYDGLKPNDIIKHFRGDVVYCAETESHFPQLTVGQTLDFAAKLRTPQNRPEGVSREEYAAHMTKVIMATYGLSHTRNTKVGNDFIRGVSGGERKRVSIAEVALSFASLQCWDNSTRGLDSATALEFIKALKTSATVLNATPMIAIYQCSQDAYDLFDKVILLYEGYQIFFGDCKQAKLYFLEMGYDCPQRQTTADFLTSLTNPSERVVRPGYENKVPRTPEEFYTYWQNSPERKALLGEIDDYLNKTDNEERLQQFKDAHNTKQSNHLRPASPYTVSYGLQVKYIMGRNIMRTKGDPSITLFSIFGNTVMGLIISSIFYNLDDTTGSFYYRTVAMFFAVLFNAFSSLLEIFALYEARPIVEKHKTYALYHPSADAFASIITELPPKLLVSISFNLVLYFMVNFRRNAGNFFFYLLVNFTATLSMSHLFRTIGSATKSLSQAMTPASVLLLALTIFTGFVIPTPEMLGWCRWINYLDPIGYAFEALIANEFHGRDFDCSQFVPSGPGYPTSGNSIICSVVGSQPGSDIVNGDDYIRGSYEYYFSHRWRNWGIVVGFVVFFLFVHIIICEYNKGAMQKGEILLFQRSALKKNKRQRKDIESGNIEKVGPEFNNEKTPDNEIDNKLPSSGDIFHWRELTYQVKIKSEDRVILNSVDGWVKPGQVTALMGASGAGKTTLLNALSDRLTSGVITSGVRMVNGHELDASFQRSIGYVQQQDLHLQTSTVREALTFSAYLRQPKSVPKSEKDSYVDYIIRLLEMEKYSDAVVGVSGEGLNVEQRKRLTIGVELVAKPKLLVFLDEPTSGLDSQTAWSICKLIRKLADHGQAILCTIHQPSAILLKEFDRLLFLQRGGKTVYFGDLGDNCQTLIDYFEKYGAPKCPPDANPAEWMLEVIGAAPGSHASQDYYDVWMNSTEYREVKGELDVMEQELVKKPKDDSPESMKTFAVPMWQQYINVTHRVLQQYWRTPSYTYSKVLMSIFSSLFNGFAFFKANNTMQGLQNQMFSVFMFFVIFNTLTQQYLPNYVSQRDLYEARERPSKTFSWVAFITAQITAEIPWQILTGTLAFFCWYYPIGLYGNAEATDTVSQRGALMWIIIVLFFIYCSTMAQLCISFMEVADNAANLASLLFTMCLTFCGILASPDAMPGFWIFMYRCNPFSYLVSAILSVALQDSSVTCSDKELLRFEPEGGQTCGEYMQSYIQNAGGYLISNDTTGSCEYCTISSTNVFLESVSVDKTKRSRDIGIFFCFIVINMIGTVFFYWLARVPKRSRQK

SEQ ID NO: 999 - DNA, 4548 bp, Kluyveromyces marxianus
  source 1..4548: mol_type = other DNA
atggaaaccgactcctcatcttctaaaccagatggttatcatggtttggactctaagactgaagaacacattaaggctttggctagaactttgtctagaacctctttgaacagacagatttccttgcaagcttctggtaatggtgcttctaaattcgatgaagtcaagtccatcttctcctcttcatactctggtgttaatccagttttcttggatccatctgctccaggttatgatgctagattagatccaaactccgaacatttttcttcagctgcttgggttaagaacatggttgctttttctatgcaagaccccgattactacaagcactatacaattggttgttgctggaaggatttgagagcttttggtgattctaacgatgtctcttaccaatctactgttactactttgccaggtaagtacttgggtaagatcaagagacatttcaccgctacaaaagaagaggacgttttcgatattttgaagccaatggatggtttggttaagccaggtgaattattggttgtattgggtagaccaggtgctggttgttctactttgttgaaaactatttccgccaacgtcgaaggttactctattgatccaaattccaccatctcttacaacggtttggatcctaaggttatcaaaaagcacttcagaggtgaagttgtttacaacgctgaaggtgatattcatttcccacatttgactgtctacgaaaccttgaatatcgttgctttgttggctactccatccaatagaatcaaaggtgtgtctagagaagaattcgctaagcacattactgaagttgctatggctacttatggtttgtctcataccaagaacacaaaggttggtggtgatttggttagaggtgtttctggtggtgaaagaaagagagtttctattgccgaagttaccatttgcggttctaagtttcaatgttgggataacgctactagaggtttggattctgctactgctttggaattcattagagccttgaaaacctccaccgatatttctggttctactgctgttattgctatctaccaatgttcccaagatgcctacgatttgttcgataaggtttgcgttttggatgaaggttaccaaatctttttcggttacgctaaggatgccaaaaagtacttcgaaaacatgggttatgtttccccagctagacaaactactgctgatttcttgacagctgttactaatccagctgaaagaatcgttaatcaggactacgtaaaagaaggcagattcattccatctaccgccaaagaaatggaagaatattggagaaattccccagagtacaagcaattgcatgccgatattgaagaagagttgtccaaagattccgccaagaatttccaacagttgcaagaatctcatgtcgccaaacaatctaagggtcaaagaaaaggttctccctacatcgttaactacagaatgcaagtgaagtacctgaccatcagaaacatcatgagaatcaagagatccttctctgttaccttgggttctattttcggtaacatcttcatgtccttgatcctgggttccatcttttacaaatctatgaagcacacgaacaccaacacgtttttctatagaggtgctgctatgtttaccgccgttttgtttaattccttcagctccatgttggagatcttcacattatatgaagccagaccaatcactgaaaagcacaagagatacagcttgtatcatccttctgctgatgctttagcttccatgatgtctgaattgccagctaaaatcgttaccgctatttgcttcaacctgatcttgtactttatggccaacttcagaagagaaccaggtccattctttttctacttcatgatgtcattcttggccaccttggttatgtcctctattttcagatgtattggtgctgctgctaagactttgtctgaagctatggttccatcctccattttgttgttggccatttcattatacgtcggtttctctgttccaaagaagtctttgttaggttggtctaagtggatctggtacattaacccaatctcgtacatcttcgagagcttgatgatcaatgaattcaacggtagagaattcccatgcgctgtttttattccatcaggtcctggttacgaaaatgtttctgctacagaaaaggtctgtaacaccgttggttcaaaaccaggtttgccatacgtttctggtaaggattttatcgttcaagcctatggttatgatccagctcatagatggcgtggttttggtattgctttggcttacttcattttcttctccgccgtttacttgttgttctgtgagtataacgaatccgctgttcaaaagggtgaaatcttggtttttccaaaggccgttttgaagaaggctaagaaagaagctttatccagaccaaagtctgatatcgaaactggtgaagatccagaaggtggtattactgatagaaagttgttgcaggattcccaagaagattccaacgaatctgttgacgaaaagcaatccgaaattgccttggaaaaatctggtgctgtttttcattggaggaacgtttgttacgatgtccagatcaagaaagaaacccgtagaatcttgtctaacgttgatggttgggtgaaaccaggtactttgactgctttgatgggttcttctggtgcaggtaaaactactttattggactgtttggcttccagagttaccatgggtgttattactggtgatatgttcgttaacggtcacttgagagataactcattccctagatctattggttactgtcaacaacaagacttgcatttgtctactgctaccgttagagaatccttgagattttctgcttacttgagacaaccatcctccgttagtattgaagataagaacagatacgtcgaacacgtcatcagaatgttaggtatggaaaagtacgctgatgctgttgttggtgtaacaggtgaaggtttgaatgtcgaacaaagaaagcgtttgaccatcggtgttgaattggctgctaaacctaagttgttgttgtttttggacgaacctacctctggtttggatagtcaaactgcttggtctgtttgtcagctgatgagaaaattggctgatcatggtcaagctattttgtgcactattcatcaaccatccgctttgttgatgcaagaatttgataggctgctgttcttgcaaaaaggtggtaagactgtttacttcggtgacttaggtcatggttgccaaactatgattgattactttgaaagaaacggtgcccataagtgtcctgaaggtgctaatcctgcagaatggatgttggaagttattggtgcagctcctggttcttcatctacagttgattaccatgaagtttggcgtaactctgaagagtacagaatggtccaaaaagaactagactggatggaagttgagttggctaaaaagcccatggatacaaccgaagaacaaaacgaatttgctacctctttgccctaccaattcaagatagttactaccaggttgttccaacaatattggcgtacaccatcttacatttggtccaaggcatttttgaccgttttctcccaaattttcatcggcttcactttcttcaaagccaagttgacattgcaaggcttgcagaatcaaatgttcgctactttcactttcaccatcattttcaacccagcttgccaacaatacttgcccttgtttgtttctcaaagggacttgtatgaagctagagaaagaccatctagaacgttttcatggttggctttcatctactcccaaatcatcgttgaaatcccattcaacatcttgttgggtactgttgctttcttcgttttctattacccagtgggtttttacaacaacgcttcttatgctggtcaattgcacgaaagaggtgtcttgttttggttgttttgtgtcgagttttacatctacatctcttccatggctcaattgtgtattgcaggtttggaacatgctgaatctgctggtaacatttcctctatcttgttcaccatgtctttgatgttctgtggtgttttcggtggtccaggtgttttgcctaaattttggaatttcatgtaccgtgtctctcccttgacatacttcattgatggtttgttgtctaccggtttggctaataccaaagctgtttgtgctgattacgaatacgttcacttcgatccaaaatccggtcaaacttgtggtaaatacttggccaactacatcaaagcctttggtggttacttggctaatccagatgctactaatgattgctcctactgcaagatctctgaatctaacactttcctgaagtccttcaagtcctcttatcataagcgttggagaaacttcggtatcttcttagtgtttatcgtttttgattgggctgcctgcatgttcttgtattggttagctagagttcctaagaagaaaaacagagtctccaatgagagaaacccagacaagttgaacaatcaagaggacaagaacaaagagaaggtctaa

SEQ ID NO: 1000 - protein, 1515 aa, Kluyveromyces marxianus
METDSSSSKPDGYHGLDSKTEEHIKALARTLSRTSLNRQISLQASGNGASKFDEVKSIFSSSYSGVNPVFLDPSAPGYDARLDPNSEHFSSAAWVKNMVAFSMQDPDYYKHYTIGCCWKDLRAFGDSNDVSYQSTVTTLPGKYLGKIKRHFTATKEEDVFDILKPMDGLVKPGELLVVLGRPGAGCSTLLKTISANVEGYSIDPNSTISYNGLDPKVIKKHFRGEVVYNAEGDIHFPHLTVYETLNIVALLATPSNRIKGVSREEFAKHITEVAMATYGLSHTKNTKVGGDLVRGVSGGERKRVSIAEVTICGSKFQCWDNATRGLDSATALEFIRALKTSTDISGSTAVIAIYQCSQDAYDLFDKVCVLDEGYQIFFGYAKDAKKYFENMGYVSPARQTTADFLTAVTNPAERIVNQDYVKEGRFIPSTAKEMEEYWRNSPEYKQLHADIEEELSKDSAKNFQQLQESHVAKQSKGQRKGSPYIVNYRMQVKYLTIRNIMRIKRSFSVTLGSIFGNIFMSLILGSIFYKSMKHTNTNTFFYRGAAMFTAVLFNSFSSMLEIFTLYEARPITEKHKRYSLYHPSADALASMMSELPAKIVTAICFNLILYFMANFRREPGPFFFYFMMSFLATLVMSSIFRCIGAAAKTLSEAMVPSSILLLAISLYVGFSVPKKSLLGWSKWIWYINPISYIFESLMINEFNGREFPCAVFIPSGPGYENVSATEKVCNTVGSKPGLPYVSGKDFIVQAYGYDPAHRWRGFGIALAYFIFFSAVYLLFCEYNESAVQKGEILVFPKAVLKKAKKEALSRPKSDIETGEDPEGGITDRKLLQDSQEDSNESVDEKQSEIALEKSGAVFHWRNVCYDVQIKKETRRILSNVDGWVKPGTLTALMGSSGAGKTTLLDCLASRVTMGVITGDMFVNGHLRDNSFPRSIGYCQQQDLHLSTATVRESLRFSAYLRQPSSVSIEDKNRYVEHVIRMLGMEKYADAVVGVTGEGLNVEQRKRLTIGVELAAKPKLLLFLDEPTSGLDSQTAWSVCQLMRKLADHGQAILCTIHQPSALLMQEFDRLLFLQKGGKTVYFGDLGHGCQTMIDYFERNGAHKCPEGANPAEWMLEVIGAAPGSSSTVDYHEVWRNSEEYRMVQKELDWMEVELAKKPMDTTEEQNEFATSLPYQFKIVTTRLFQQYWRTPSYIWSKAFLTVFSQIFIGFTFFKAKLTLQGLQNQMFATFTFTIIFNPACQQYLPLFVSQRDLYEARERPSRTFSWLAFIYSQIIVEIPFNILLGTVAFFVFYYPVGFYNNASYAGQLHERGVLFWLFCVEFYIYISSMAQLCIAGLEHAESAGNISSILFTMSLMFCGVFGGPGVLPKFWNFMYRVSPLTYFIDGLLSTGLANTKAVCADYEYVHFDPKSGQTCGKYLANYIKAFGGYLANPDATNDCSYCKISESNTFLKSFKSSYHKRWRNFGIFLVFIVFDWAACMFLYWLARVPKKKNRVSNERNPDKLNNQEDKNKEKV

SEQ ID NO: 1001 - DNA, 4458 bp, Zygosaccharomyces bailii
  source 1..4458: mol_type = other DNA
atggaagcctctgaatacggtggttttgatcataatgctgaaaacgaggttaagaagatggctaaggctttggtcaaagagaactctaacaatagaccactggactcctcatctatttctagagttacttctggtattaacccagtcggtttacaagaaactgatactggttacaacgctaagttggacccaaattctaacgacttctcatctgaagaatggaccagaaatttggccaacatcgttgaatctgaaccagagtattacaagccacattctgttggttgttgttggaagaatttgtctgctgctggtgattctgctgatttgacttaccaaactactttcggtaacttgccagtcaagatcttcagtttgttgtacagacatatcaggccatctaagggttctgataacttccaaattttgaagccaatggatggtttggttgacccaggtgaattattggttgttttaggtagaccaggttctggttgtactactttgttgaagtctatttcctgtaacacccacggttttaacgttggtaaagattccgttatcaagtactctggtatggcctctaaggacattagaagaaatttgagaggtgaagttgcttacaacgccgaatctgatactcatattccaaacatcactgtctaccaaaccttggttactgttgctagattgaaaaccccaagaaacagaatcagaggtatcgatagagaatcctgggctaaacatattgctgaagttactatggctacctacggtttgttgcataccagaaataccaaagttggtaacgacttgatcagaggtgtttctggtggtgaaagaaagagagtttctatagctgaagctaccatttgtggtgctaagtttcaatgttgggataacgctactagaggtttggattctgctactgctttggaatttgttagagctttgagaacccaagccaagattaacaattctactgcttgtgttgctatctaccaatgctctcaacatgcttacgatttgttcgataaggtttgtgtcttgtatggtggttaccagatctattttggtccaacctctaacgccaaaaagtacttcgaatctatgggttactactgcccatctagacaagctacagctgatttcttgacttctattacttctccagccgaaagaatcgtcaacagagaatttttggaacgtaacatcgtcgttccacaaactccagacgaaatgtacttgtactggcaaaattctccagaaaaccacgaattgcaaagggaaatcgattctagattgacgcaggactacaaagaaaacttgacagctattaaggcttcccataatgccgctcaatctaagagagctagaaaatcttctccatacaccgtttcttatgccatgcaagttaagtacctgctgattagaaatatgtggcgtatcattaactctccaggtgttactttgttcagagtgttcggtaacatcatcatgtctttggttttgggctctatgttctacaaggttcaaaagactactaccaccaacaccttttattacagaggtgctgctatgttttactccattttggttaacgccttcagctccttgattgaaattttcgctttgttcgaagctagaccagttactgaaaaacataagacttacgccttgtatagaccatctgctgatgcttttgcttccttcttgtctgatattccaggtaaggttgtttctaccgttgccttctctattatctactacttcttggtcaacttcagaagagatgccggtagatttttcttctacctgttgattaacttggtcaccactttcaccatgtctcacttgtttagatgcgttggttccatttctaagactttgactgaagctatggttccagctagtgttttgttgttgactttggctgtttacaccggtttctctattcctagaagatctatgcatgaatggtccaagtggatctcttacattgatccattgtcctacttgttcgaatccgttatgactaacgaattccatggtagaaatttcccatgcgctgcttacattccaaatggtccacaatatcaaaacaccaccggtactgaaagagtttgttctgttgttggttctaaggctggtcatgattatgttttgggtgatgactacttgaagcagtcttacgaatacgaaatcaaacataagtggcgtggttttggtgttggtatggcttatgttgttttcttcttcttcgtctacttgctgatctgtgagtataatgaagctgctaagcaaaagggtgacttgttggtttttccaagatccatcgttaagaaaatgagaaggcagggtacattgcagaagtctaattcagaacctgaagatgttgaaaagaacgccaccattattgctaacgtttctccagattcctccttgttattggatactttggaatccccatccaagcaaaagtctgaaatcccattgaatcaatccgacaccattttccattggagaaatgtttgctacgatgtccacatcaagaaagagtctagaaggatcttgaacaacgttgatggttgggttaagccaggtactttgacagctttgatgggtgcttctggtgctggtaaaacaactttgttggattgcttggctaaaagggttaccactggtgttattactggtgaaatcttcgtcaacggtaaattgagggatgaatctttcccaagatcaatcggttattgtcaacagcaagacttgcatttgaaaaccgctactgttagggaatccttgttgtttagtgctatgttgagacaacctaagaaggttccattgtctgaaaagaagcaatacgtcgaacagatcatcgaagttttggaaatggttccatacgctgatgctatcgttggtattgaaggtgaaggtttgaacgtggaacagagaaaaagattgaccatcggtgttgaattggttgctaaacctaagctgctgttgtttttggatgaacctacatctggtttggactctcaaactgcttggtctatttgccagttgttgagaaagttggctaacagaggtcaagctgttttgtgtactattcatcaaccatccgccttgttgattagagaatttgatcgtttgctgttcttgcagaaaggtggtaagactgtttactttggtgaattgggtgacgaatgcaagaccatgattgattacttcgaaagaaatggtgctcataagtgtccaccagatgctaatccagctgaatggatgttggaagttgttggtgctgctccaggtactcatgcttctcatgattacaatgaagtttggaggaactccgaagagtacaaagaagttcaacaagaattggacaggatggaatctgaattgaaatgtgtcggtgaagaggactcttccgaaaaacatcaagcttttgctaccgacatcttctcccaaatattgattgtctctcacagattcttccagcagtattggagaacaccacaatatttgtggccaaagttcattttgactgccttcgacgaaattttcatcggctttactttcttcaaggccaccagatctttacaaggcttgcaaaatcaaatgctgtccacctttgttttctgcgttgtttacaatgctttgttgcagcaattcttgccagtttacgttgagcaaagaaacttgtacgaagcaagagaaagaccatctagaaccttctcttggttttccttcatctcctcacaaatcttggttgaagttccctggaacattattgcaggtactattgctttcttcgtgtactactatccagttggtttctacgctaatgcctctgaagctaatcaattgcacgaaagaggtgcattatactggttgttctgtaccgctttctttgtttggataggttccatgggtattctggccaattctttcttggaacatgctgctgaagctgcaaatgttgctttattgtgtttcgctttctctttggctttttgcggtgttttggttccaccaaagttattgccaggtttctggatctttatgcacagagtttctccactgacctactacattgattcagctttgtctttgggtattgccaacgttgacgttaagtgctctgaaatcgaatacgttaagttcactccaccatctaacagaacttgtggtcagtatatgcaagcctacattaagtctattggtacaggttatttggctgatccatctgctactaatgaatgcaacttctgcagattgtctaagaccaacgattacctgaagcagatctcatcttcatattctcatagatggcgtaactacggtatcttcatttgcttcatcgttttcaactatgttgccgccgttttcttgtattggttggctagagttccaaagagagaaggtagagtctctaagaagaagcaagaacactga

SEQ ID NO: 1002 - protein, 1485 aa, Zygosaccharomyces bailii
MEASEYGGFDHNAENEVKKMAKALVKENSNNRPLDSSSISRVTSGINPVGLQETDTGYNAKLDPNSNDFSSEEWTRNLANIVESEPEYYKPHSVGCCWKNLSAAGDSADLTYQTTFGNLPVKIFSLLYRHIRPSKGSDNFQILKPMDGLVDPGELLVVLGRPGSGCTTLLKSISCNTHGFNVGKDSVIKYSGMASKDIRRNLRGEVAYNAESDTHIPNITVYQTLVTVARLKTPRNRIRGIDRESWAKHIAEVTMATYGLLHTRNTKVGNDLIRGVSGGERKRVSIAEATICGAKFQCWDNATRGLDSATALEFVRALRTQAKINNSTACVAIYQCSQHAYDLFDKVCVLYGGYQIYFGPTSNAKKYFESMGYYCPSRQATADFLTSITSPAERIVNREFLERNIVVPQTPDEMYLYWQNSPENHELQREIDSRLTQDYKENLTAIKASHNAAQSKRARKSSPYTVSYAMQVKYLLIRNMWRIINSPGVTLFRVFGNIIMSLVLGSMFYKVQKTTTTNTFYYRGAAMFYSILVNAFSSLIEIFALFEARPVTEKHKTYALYRPSADAFASFLSDIPGKVVSTVAFSIIYYFLVNFRRDAGRFFFYLLINLVTTFTMSHLFRCVGSISKTLTEAMVPASVLLLTLAVYTGFSIPRRSMHEWSKWISYIDPLSYLFESVMTNEFHGRNFPCAAYIPNGPQYQNTTGTERVCSVVGSKAGHDYVLGDDYLKQSYEYEIKHKWRGFGVGMAYVVFFFFVYLLICEYNEAAKQKGDLLVFPRSIVKKMRRQGTLQKSNSEPEDVEKNATIIANVSPDSSLLLDTLESPSKQKSEIPLNQSDTIFHWRNVCYDVHIKKESRRILNNVDGWVKPGTLTALMGASGAGKTTLLDCLAKRVTTGVITGEIFVNGKLRDESFPRSIGYCQQQDLHLKTATVRESLLFSAMLRQPKKVPLSEKKQYVEQIIEVLEMVPYADAIVGIEGEGLNVEQRKRLTIGVELVAKPKLLLFLDEPTSGLDSQTAWSICQLLRKLANRGQAVLCTIHQPSALLIREFDRLLFLQKGGKTVYFGELGDECKTMIDYFERNGAHKCPPDANPAEWMLEVVGAAPGTHASHDYNEVWRNSEEYKEVQQELDRMESELKCVGEEDSSEKHQAFATDIFSQILIVSHRFFQQYWRTPQYLWPKFILTAFDEIFIGFTFFKATRSLQGLQNQMLSTFVFCVVYNALLQQFLPVYVEQRNLYEARERPSRTFSWFSFISSQILVEVPWNIIAGTIAFFVYYYPVGFYANASEANQLHERGALYWLFCTAFFVWIGSMGILANSFLEHAAEAANVALLCFAFSLAFCGVLVPPKLLPGFWIFMHRVSPLTYYIDSALSLGIANVDVKCSEIEYVKFTPPSNRTCGQYMQAYIKSIGTGYLADPSATNECNFCRLSKTNDYLKQISSSYSHRWRNYGIFICFIVFNYVAAVFLYWLARVPKREGRVSKKKQEH

SEQ ID NO: 1003 - DNA, 4500 bp, Kazachstania africana
  source 1..4500: mol_type = other DNA
atgtctaccccaaaggatatcgacgtcaacttgtctaaatacgataccgttttgtccaacgactctccatctaatacttacaacggtttcgatgacgaatccagaaagttggttagaaacttggctaagactctgacctctaacttcgaatctactgaatcttctgccttgtcctacaatgttagagataccaacgttatgatcatgaacccatctgaaccaggttacgataagagattggatcctaactctgacgagttctcttccaaattgtggattcaatacttggcccatttgtcctctactgacccagaatattacaagccattttctttcggttgtacctggaagaacttgtctgtttctggtgattctgctgatgttacttaccaatccaccattttcaacgtcccattcaagattttgggcaaagtttacagaaggttcagaccagctagagactctaactctttccaaattttgaagccaatggaaggttacttggacccaggtgaattattggttgttttgggtagaccaggttctggttgtactactttgttgaaaaccatctcctctaacacccatggtttcagagttgataaggattccgttatctcctataacggtttgactccaagagaaatgagaaagcactttagaggtgaagttgtttacaacgccgaatccgatgttcatttgccacatttgactgttttcgaaaccttatacaccgtcgctagattgaaaactccaactaatagaatcaagggtgttgacagagatacctacgctagacatattaccgatgttgctattgctacttacggtttgtctcataccaagaacactaaggttggtaacgctttggttagaggtgtttcaggtggtgaaagaaagagagtttctattgccgaagtttccatttgcggttctaagtttcaatgttgggataacgctactagaggtttggattctgctaatgccttggaattcattagagctttggataccgaatcctctttgctaaaaactgctgctgttgttgctatctaccaatgttctcaaactgcctacgatttgttcaacaaggtttgcgttttgaacaagggttaccaaatctacttcggtccaattgatgaagctaagggttactttgaatccatgggttacaaatgcccagatagacaaactactgctgatttcttgacctctatcaccaatccatctgaaagaatcgttaacccagaattcatcgaaaagggtattccagttccacaaactccagacgaaatgtacacttactggaagtcatctagggaatacgaagagttgatgaagaagatcgacatcaggttgtctgaaaacgaagatgttacccgtaagatgatgaagtcatcacatgttgctagacagtccaagggtattagatctggttctccatatactgttagatacggcttgcaagtcagatacttgttgactagaaacttctggcgtatccgtaacaacatttctgttccattggttatgttcatcggcaattcttccatggctttcattttgggttctatgttcttcaaggccatgcaacaagataacactactaccttttatttcagaggtgctgctatgtttttcgctatcttgttcaactctttcagctgcttgttggaaatcttcaccttgtatgaagctagaccagtttccgaaaaacacagagcttactcattataccatccttccgctgatgctttcgcttctattttctctgaattgccaaacaagatcgtcatctccgttgtgttcaacatcatctactacttcatggtcaactttagaagaactgctggtgctttctttttctactggttgatttctttggttggcgtttttgccatgtctcatttgtttagaactgtcggttctttgaccaagactttgtctgaagctatggttccagcttccattttgttgttgtctatgtctatgtacgctggtttcgctattccaaagactaagatgttaggttggtctaagtggatctggtacattaacccaattgcctacttgttcgaatccttgatggttaacgaattccacggtagagaattccaatgcgctaatttcattccatctggtccaacttactctaatgctactggtgacgaaagatcttgttctactttgggtgctattccaggttcttcttatgtattgggtgacaactacttgagacagtcctatgattacttgtaccaacataagtggcgtggttttggtattggtttggcttatgctgttttcttcttggtcgtttacttgatcgtttgcgaattcaatgaaggtgctaagcaaaagggtgagatgttggtttttccacatggtgttctgaagaaattgaaaaagaggggtgttttgtccgatgatgataagagagattttgagaagggttctttcgatgctaccaaccatgatttgattaaggactctgaatccaccgacgaatcttctactaatggtgctagactgttgaagtctcaagctgtttttcattggaggaacttgtgctacgatattccaatcaaacacggtactagaaggttgttggataatgttgatggttgggttaagccaggtactttgactgctttgatgggtgcttctggtgctggtaaaactactttattggattgcttggctgaaagggttacaatgggtgtaattactggtgatgttttggtcgatggtagaccaagagatgaatctttcccaagatctattggttactgccaacaacaagacttgcacttgaaaacttctaccgtcagagaatctttgagattctcagcctatttgagacaaccagctgaagtttctgttgaagaaaaggatgcttacgtcgaagaggtcattaagatattggagatggaaaagtacgctgatgcagttgttggtgttgctggtgaaggtttgaatgtcgaacaaagaaaaagattgaccatcggtgttgaattggctgctaaacctaagttgttagttttcttggacgaacctacttctggtttggatagtcaaactgcttggtctatctgtcagttgatgagaaaattggcatcacatggtcaagctattttgtgcactattcatcaaccatccgccatcttgatgcaagaatttgatagattgctgttcttgcaggatggtggtcaaacaacttactttggtgaattaggtgatggttgctgcactatgattgactactttgaaagaaacggtgctcataagtgtccaattggtgctaatccagctgaatggatgttggaagttgtcggtgctgctccaggttcacaagctactcaagattactttaagatctggcgtaactccgaagaattcaaggctgttcacaaagaattggacagcttggaaaaagagtctaacttaagaccagaaggtatcactactgatcatgctgaattcgctacttccattccataccaaatcagattggtttctgctaggttgttccaacagtacattagggctccagaatacttgtggtctaaatttggtttgaccattgtcgacgagttgttcattggtttcactttctttaaggccggtactagcttgcaaggtctacaaaatcaaatgttggctgctttcatgttcaccgttgtttttaacccactgttgcagcaatacttgccatctttcgttcaacaacgtgacttatacgaagctagagaaagaccatctagaaccttttcatggaaggctttcatcgtttcccaaatcttggttgaagctccatgtaatttcttggctggtactttggcttacttcatctattactacccaatcggtttctacgaaaacgcttcttttgctggtcaattgcacgaaagaggtgctttgttttggttgttctctacaggcttttacgttttcgttggttctatgggtttcctgactgtctcttttaatgaagttgctcaaaatgctgccggtattgcttctttgatgttcgttatgtgtactaccttctgtggtgttttggctactccagaagttatgccaggtttttggattttcatgtacagattgtctcccttgacctacttcgttcaaggtttcttagctacaggtttggctaacgctaaaatccagtgttcggagaaagagttcattgtcttttctccaccatctggtatgaattgtggtcagtacatggaacagtacatcactaatactggtactggctacttggaagattctgaatctacatctacctgcgaattctgccaattctcttacactaatgactttttggcctccgtcaactccttttattctcaacgttggaggaattggggtatcttcatttgttacattgccttcaattatatggccggcattttcttgtattggttggcaagagttccaaagaagtcctctggtttgaaaagaaagatccgtaagaacgagctgtcctga

SEQ ID NO: 1004 - protein, 1499 aa, Kazachstania africana
MSTPKDIDVNLSKYDTVLSNDSPSNTYNGFDDESRKLVRNLAKTLTSNFESTESSALSYNVRDTNVMIMNPSEPGYDKRLDPNSDEFSSKLWIQYLAHLSSTDPEYYKPFSFGCTWKNLSVSGDSADVTYQSTIFNVPFKILGKVYRRFRPARDSNSFQILKPMEGYLDPGELLVVLGRPGSGCTTLLKTISSNTHGFRVDKDSVISYNGLTPREMRKHFRGEVVYNAESDVHLPHLTVFETLYTVARLKTPTNRIKGVDRDTYARHITDVAIATYGLSHTKNTKVGNALVRGVSGGERKRVSIAEVSICGSKFQCWDNATRGLDSANALEFIRALDTESSLLKTAAVVAIYQCSQTAYDLFNKVCVLNKGYQIYFGPIDEAKGYFESMGYKCPDRQTTADFLTSITNPSERIVNPEFIEKGIPVPQTPDEMYTYWKSSREYEELMKKIDIRLSENEDVTRKMMKSSHVARQSKGIRSGSPYTVRYGLQVRYLLTRNFWRIRNNISVPLVMFIGNSSMAFILGSMFFKAMQQDNTTTFYFRGAAMFFAILFNSFSCLLEIFTLYEARPVSEKHRAYSLYHPSADAFASIFSELPNKIVISVVFNIIYYFMVNFRRTAGAFFFYWLISLVGVFAMSHLFRTVGSLTKTLSEAMVPASILLLSMSMYAGFAIPKTKMLGWSKWIWYINPIAYLFESLMVNEFHGREFQCANFIPSGPTYSNATGDERSCSTLGAIPGSSYVLGDNYLRQSYDYLYQHKWRGFGIGLAYAVFFLVVYLIVCEFNEGAKQKGEMLVFPHGVLKKLKKRGVLSDDDKRDFEKGSFDATNHDLIKDSESTDESSTNGARLLKSQAVFHWRNLCYDIPIKHGTRRLLDNVDGWVKPGTLTALMGASGAGKTTLLDCLAERVTMGVITGDVLVDGRPRDESFPRSIGYCQQQDLHLKTSTVRESLRFSAYLRQPAEVSVEEKDAYVEEVIKILEMEKYADAVVGVAGEGLNVEQRKRLTIGVELAAKPKLLVFLDEPTSGLDSQTAWSICQLMRKLASHGQAILCTIHQPSAILMQEFDRLLFLQDGGQTTYFGELGDGCCTMIDYFERNGAHKCPIGANPAEWMLEVVGAAPGSQATQDYFKIWRNSEEFKAVHKELDSLEKESNLRPEGITTDHAEFATSIPYQIRLVSARLFQQYIRAPEYLWSKFGLTIVDELFIGFTFFKAGTSLQGLQNQMLAAFMFTVVFNPLLQQYLPSFVQQRDLYEARERPSRTFSWKAFIVSQILVEAPCNFLAGTLAYFIYYYPIGFYENASFAGQLHERGALFWLFSTGFYVFVGSMGFLTVSFNEVAQNAAGIASLMFVMCTTFCGVLATPEVMPGFWIFMYRLSPLTYFVQGFLATGLANAKIQCSEKEFIVFSPPSGMNCGQYMEQYITNTGTGYLEDSESTSTCEFCQFSYTNDFLASVNSFYSQRWRNWGIFICYIAFNYMAGIFLYWLARVPKKSSGLKRKIRKNELS

SEQ ID NO: 1005 - DNA, 4587 bp, Kuraishia capsulata
  source 1..4587: mol_type = other DNA
atggtgtcctctgataccgattccatcgttgttaagtctgatgctggttctgatgttgcttcttacagaggttttgatgctactgctgatgaacaagttcatgatttggctagaaagttgaccaacgaatctggtcatttgtctttgtttttggctgatggtaaacctagaccatccgttgtttctgattctgctcatttggttagaaccttgtctaccatgtctaatgttccaggtgtttctactttcaccgaaggtgaaattgattccagattggacccaaactctgatgatttcgattctaagttgtgggtcaagaacttccgtaagttgatggataatgatcccgattactacaagcacacctctttgggtattgcttacagaaatttgagagcttctggtattgctgctgatgcttcttatcaacctaccattttgaactacccatacaaggttgttgaggacttgtacaacaagttcgctaaagaaaatccagccagattcttcgatatcttgaaacctatggatgccattatgaagccaggttctttgactgttgttttgggtagaccaggtgctggttgttctactttgttgaaaactatttccgctcagacctacggttttaagattgctccagaatccgaaatctcttacgatggttttaccatgaacgagatcaacaaacactacagaggtgaagttgtttactccgctgaagttgataatcatttcccacatttgacagtcggtcaaactttgaattttgctgctggtttgagaaccccacaaaacagaggtaatggtatcaacagagaagtttacgctaagcacatgaccgatgtttacatggctacttatggtttgttgcataccagaaacactaaggttggtaacgatttggtaagaggtgtttcaggtggtgaaagaaagagagtttctattgccgaagtttctttgtgtggttctgctttacaatgttgggataatgctactagaggtttggacgctgctacagctttggaattcattagagctttgaaaacttccgccgttttgttggatacaactccattgattgctatctaccaatgctctcaagatgcctacgatttgtttgataacgtcatcgtcttgtacgaaggttaccagatctattttggtttgggtactaaggccaaggactactttttgagaatgggttatgattgcccaccaagacaaactacagctgatttcttgacttctctgactaacccatctgaaagagttgctaaaccaggtttcgaaaacaaggttccaaagactccaaaagagttctccgattattggagaaactccccagaattcgttgaattgactgaagaagttgacgcctacatccaagatcataaggttaacaatgctaccaccgaattcttggaatctaaggttgctagacaatccaatcataccagaccaacttcatcttacaccgtgtcttattccatgcaaatcaaggccattttgagaagaaattggtggcgtttacaaggtgatccatctattactctgttctccgttatcgctaacaccataatgggtttgttgttgtcctctctgttttacaatttgccagctacttctggctctttctattacagatctgcttctttgttcttcgccgtcttgtttaatgctttcagctctttgttggaagtcatggctttgtttgaatccagaccaattatcgagaagcacaaaaagtatgccttgtaccatccatcagcagatgctatggcttccattatttctgaatttccaccaaagttgattaccgccgttggttttaacttggtcttttacttcatggtgaacttcagaagaaacccaggtagattcttcttctacttcctggttaatttcttggctaccttggctatgtcccatatctttagatctatcggctctttttacaagaccttgtctgaagctatgtctttggctgctttgattttgttggctttggttatctacaccggtttcgttgttccaactccatctatgttaggttggtctagatggattaactacttggatcctattgcctacgtgttcgaatctttgatgacaaacgaattccaagacaggttgttcgaatgctctgcttttattccatctggtgaagcttactctaaatacccatctgctaacaaggtctgttcctctgtttcttcagttgctggtgaagattttgtcaacggtactaagtatgttaacgctgcttatgcctactacaacaagcacaaatggcgtaatgttggtgttgttattgccttcgttgttttcttcttgggtgtttacttggccatttgcgaattgtctagaggttcattgcaaaagggtgaagtcttggttttccaatcttctaccttgaggaaattgaaaaagcaaaacaagctgatcaactccgacgatccagaatctgctttgaatggtgaaaagcaagcctccgttatagaagaaactggttctacttctgaggacaaaggtggtgctgctgttaagttgtctgctggtaaagatattttccattggagagatgtttgctacgaggttaacattaagaccgaagtcagaaagatcttgaaccatgttgatggttgggttaagccaggtacattaactgctttaatgggtgcttctggtgcaggtaaaactaccttgttggatgttttggctaacagagttactatgggtgttgtaaccggttctatgtttgttaacggtagattgagagatgactccttccaaagatctactggttacgttcaacaacaagacttgcacttgcaaactgctactgttagagaatccttgagattctctgcttacttgagacaaccagcttctgtttctcaagctgaaaaggatgaatacgtcgaaaacgtgatcgaaatcttggagatggaaaagtacgctgatgctatagttggtgttagtggtgaaggtttgaacgttgaacagagaaaaagattgaccatcggtgttgaattggctgctaaacctcaactgttgttgttcttggatgaacctacatctggtttggattctcaaactgcttggtctatttgccagttgatgagaaagttggctgataacggtcaagctattttgtgcactattcatcaaccatccgctatcttgttgcaagaatttgacagattgctgttcttagctagaggtggtagaactgtttactttggtgatttgggtgaaaactgtaccaccttgattgactacttcgaaaaacatggtgctcatccatgtccacatgatgctaatccagctgaatggatgttagaagttattggtgctgcaccaggttctcatgctaatcaagattatcatgaagtctggatgaactctgctgaaagagctgcagttagaactgaattagctaccatggaacacgaattggttaagatcccaaaagatgattctccagacgccagaaaagaatttgctgctccattgtggtttcagtacactcaagttactagaagggttttcgaacagtacttcagaactccaacttacatttggtccaagctgttgttgactattatctccgctattttcaacggcttctcatttttcaaggctggtttgtcattgcaaggcttgcagaatcaaatgttggctatcttcatgttcctgatcgttttgatgactttgacccaacaatacttgcccaactacgtttttcaaaggggtctatatgaagctagagaaagaccatctaagaccttttcttggttggctttcattttggcccaaattaccgttgaaattccatggcagatgttgtgtggtactttgtcatttttctgttggtactacccagtcggtatgtacgaaaatgctgttgctactgatactgttcacgaaagaggtgctttaatctggttgtatattgtcgcctttttcgtttacgcttccactttggctcaattgtgtgttgcaggtatggaaattgctgataatgctgctaatttggcctctctgatgttcacaatgtccttgaatttctgcggtatcttgaagtacccatccggtttttggattttcatgtacagagtttccccattcacttactgggttcaaggtgttttgtctactggtgttggtaaatccaaggttacttgttctacctccgaatacgttcattttccaccaccatcaggtatgaattgtggtgattatatgaaggactacatttctgcagctggtggttacttattggatgaagatgagacttctaagtgctctttctgttctactgcttctactgatgtctacttggcttctgttaactcctactattctcagcgttggagaaattacggtatctacattgccttcattttcatcaacatcttcggcaccgttttcttgtattggttggttagagttcccaagtccaagaatagagttaaggatgaagctccatcagctgaagaagaggaacaaaagactatcgaaagacagttgtctagaacccaatccagaaactccaaaaagtccagaaagtcgatcatctaa

SEQ ID NO: 1006 - protein, 1528 aa, Kuraishia capsulata
MVSSDTDSIVVKSDAGSDVASYRGFDATADEQVHDLARKLTNESGHLSLFLADGKPRPSVVSDSAHLVRTLSTMSNVPGVSTFTEGEIDSRLDPNSDDFDSKLWVKNFRKLMDNDPDYYKHTSLGIAYRNLRASGIAADASYQPTILNYPYKVVEDLYNKFAKENPARFFDILKPMDAIMKPGSLTVVLGRPGAGCSTLLKTISAQTYGFKIAPESEISYDGFTMNEINKHYRGEVVYSAEVDNHFPHLTVGQTLNFAAGLRTPQNRGNGINREVYAKHMTDVYMATYGLLHTRNTKVGNDLVRGVSGGERKRVSIAEVSLCGSALQCWDNATRGLDAATALEFIRALKTSAVLLDTTPLIAIYQCSQDAYDLFDNVIVLYEGYQIYFGLGTKAKDYFLRMGYDCPPRQTTADFLTSLTNPSERVAKPGFENKVPKTPKEFSDYWRNSPEFVELTEEVDAYIQDHKVNNATTEFLESKVARQSNHTRPTSSYTVSYSMQIKAILRRNWWRLQGDPSITLFSVIANTIMGLLLSSLFYNLPATSGSFYYRSASLFFAVLFNAFSSLLEVMALFESRPIIEKHKKYALYHPSADAMASIISEFPPKLITAVGFNLVFYFMVNFRRNPGRFFFYFLVNFLATLAMSHIFRSIGSFYKTLSEAMSLAALILLALVIYTGFVVPTPSMLGWSRWINYLDPIAYVFESLMTNEFQDRLFECSAFIPSGEAYSKYPSANKVCSSVSSVAGEDFVNGTKYVNAAYAYYNKHKWRNVGVVIAFVVFFLGVYLAICELSRGSLQKGEVLVFQSSTLRKLKKQNKLINSDDPESALNGEKQASVIEETGSTSEDKGGAAVKLSAGKDIFHWRDVCYEVNIKTEVRKILNHVDGWVKPGTLTALMGASGAGKTTLLDVLANRVTMGVVTGSMFVNGRLRDDSFQRSTGYVQQQDLHLQTATVRESLRFSAYLRQPASVSQAEKDEYVENVIEILEMEKYADAIVGVSGEGLNVEQRKRLTIGVELAAKPQLLLFLDEPTSGLDSQTAWSICQLMRKLADNGQAILCTIHQPSAILLQEFDRLLFLARGGRTVYFGDLGENCTTLIDYFEKHGAHPCPHDANPAEWMLEVIGAAPGSHANQDYHEVWMNSAERAAVRTELATMEHELVKIPKDDSPDARKEFAAPLWFQYTQVTRRVFEQYFRTPTYIWSKLLLTIISAIFNGFSFFKAGLSLQGLQNQMLAIFMFLIVLMTLTQQYLPNYVFQRGLYEARERPSKTFSWLAFILAQITVEIPWQMLCGTLSFFCWYYPVGMYENAVATDTVHERGALIWLYIVAFFVYASTLAQLCVAGMEIADNAANLASLMFTMSLNFCGILKYPSGFWIFMYRVSPFTYWVQGVLSTGVGKSKVTCSTSEYVHFPPPSGMNCGDYMKDYISAAGGYLLDEDETSKCSFCSTASTDVYLASVNSYYSQRWRNYGIYIAFIFINIFGTVFLYWLVRVPKSKNRVKDEAPSAEEEEQKTIERQLSRTQSRNSKKSRKSII

SEQ ID NO: 1007 - DNA, 4596 bp, Cyberlindnera americana
  source 1..4596: mol_type = other DNA
atgacctccatccacgatattgaagatgctagtgctgaagatgttaacagatacgatggttacactaacaccgttgattctgctgttactgaattggctagacaaatcaccaaccactctcaatcttcatttcaagatgtcccatacaaattggctgctggtgaatctgaacaagatgctttgtctagagtttccactattgctcaaggtgttaacccaatgtctgacatgtctaatatcgatccaagattggacccaaactccgatgaattcaattctagatactggatcaagaacttcaaggccttaatggataaggatccagatcactaccaaaactactcattgggtattgccttcaaggatttgagagcttatggtgatgctactggtgctgattatcaaactactactttgaacgctccaatgaagttcgctgttcaatacgctaaggatatcttctcatctaaggctgctaaaatggccaacaagttcgatattttgaagccattggatggcattatcaagccaggtgaagttgttgttgttttgggtagaccaggtgctggttgtactacttacttgaaaactattgctgctaacacccacggttttgatgttggtgaagaatccgaaatttcttacgacggtttgacctcttccgaaatcaagaaacattttagaggtgaggttgtctacaacgccgaatctgatattcatttcccacatttgactgtctggcaaactttgactacagctgctaaattcagaaccccagaaaacagaattccaggtgtttctagagaacaatacgctgaagctttgaccaatgtttacatggctacttatggtttgtctcacactaagaacactaaggtcggttctgaaatagttagaggtgtttcaggtggtgaaagaaagagagtttctattgccgaagtttctttggctggtgctagattgcaatgttgggataatgctactagaggtttggattctgctactgccttggaattcattagagctttgagaactcaagccgatgttttggatacaactgctttgattgctatctaccaatgctctcaagatgcctacgatttgttcgataaggtttctgtcttgtacgaaggttaccaaatctttttcggtaaggctgataaggctaaagaatacttcgttaacatgggttgggattgtccagctagagctactactgctgatttcttgacttctgttacttccccaagagaaagagaacctagagctggttttgaaaacaaggttccaaaaactccagaagagttctctatctattggaggaattctccagaaagagccgagttgttgaaagaagttgaaactactttggctcagaacaacaattccgaattgaagcaatctatctacgatgccaaacactctaggcaatctaagagaatgagatcctcttctccattcaccgtttctgttttgttgcagactaagtacttgttagccagagaagtctacaggattaagaatgattggggtttccacttcttctctatgggtgctaattctttgatggccttggttttgtcctccatcttttacaatttgccatctaccacctcgtccttttattacagaggtgctgctatgtttttcgcctgtttgtttaatggcttctcgtccttcttggagatcttgtctttgtttgaagctaggccaattatcgaaaagcacaagcaatatgccttgtaccatccatctgctaatgctttggcttccgttatttctcaattgccattcaaagctttcaccgccttgtttttcaacctgatcttttacttcatggtcaacttcagaagaaacccaggtagattcttcttctacatgttggctaatgttactgctaccttgaccatgtctcactttttcagattgattggttctgctgcctcatcattgcaagaagctgttgttccaggtcacatagttttgttgggtttagctatgttcgttggtttcactttgccagtcgattatatgttaggttggtgtagatggatcaactacattaacccattggcctattctttcgaagccttgatggctaacgaattccatgatagagaattcggttgttcagcttatttgccaggtgatccagctgatcatccatcttggtcatctgattcttggatctgtaattctgttggtgctgttgctggtgagtatactgtttctggtgataggtacattgagttggcttactcttacaagaacactcataagtggcgtaacttcggtatttccattgctttcatgatctttttcttggtgttctacatggtgttctccgagtataatgaatccgctaaacaaaagggcgagatcctgttgtttcaaaggtctaatttgaagaagattaagaaagaaaagggcgccatcaatgatgttgaagctggtaatggtagagaagttgtttcccaagatgaatccgaagaacaacaggttgatgctattcaagctggtactgatattttccattggagagatgttcactacaccgtcaaaatcaaatccgagtacagagaaatcttaggtggtgttgacggttgggttaagccaggtactttgactgctttaatgggtgcttctggtgcaggtaaaacaactttgttggatgttttagcctccagagttactatgggtgttgttactggtaacatgttcgttaacggtagactgagagattcctcattccaaagatctactggttacgttcaacaacaagacttgcatttgtctaccgctactgttagagaagccttaagattttctgcctacttgagacaaccagcctctgtttctaaagctgaaaaggatgcttacgtcgaagaatgcattaagatcttggacatgcaaaagtacgctgatgctatagttggtgttgccggtgaaggtttaaatgtcgaacaaagaaaaaggttgaccatcggtgttgaattagctgctaagccaaagttgctgttattcttcgatgaacctacatctggtttggactctcaaactgcttggtctatttgtcagttgatgagaaagttggctaaccacggtcaagctattttgtgtactattcatcaaccatccgccatcttgatgcaagaatttgataggttgctgttcttggctagaggtggaagaactgtttatttcggtgatttgggtaagaactgccaagttttgatcgactacttcgaatctcatggtgctccaaaatgtccaggtgatgcaaatccagcagaatggatgttgcaagttattggtgctgctccaggttctcatgctaatcaagattatcatcaagtctggctgaactccaaagaaagacaggctgttttagatgagttggactctatggaaagagagctagtttcaattccttacgatggtgattctaagcactctgaatttgctgcaccattttacgttcagttgtacgttgttaccgaaagggtgtttcaagaattttggagaaccccatcttacatttgggccaagatgttcttgtcctctatctcctctttgttcatcggcttcattttcttcaaggctaaaaacaccattcagggcttgcaaaatcagatgttcgctctgtttatgttcctggtcgtttttaaccctttgctgcaacagactttgccaacctttgttaatcagagaaacctgtacgaaaccagagaaagaccagctaaaacttttgcttggcaagccttcattctgtcccaaattattgctgaaatcccctggaatatcttcgttggtactttaggtttcttttgcttctattacccaccagctttttaccaaaatgccgaaccatatcatgaagttaatgcaagaggtgcttacgcctggtttttctctattttgttctacgtctacatcggtactatggctcatatgtgtatggctccattggatttggttgattcagctggtaacttgggttctttgttgttcactatgtgcttgaatttctgcggtgttttggtcacaaaagaagctatgccaggtttttgggttttcatgtatagagtttcacccttcacctactacatcgaaggtttcttaactaacgctgttgcccataacgatattgtctgtgctgataatgaataccgtgtattggttccaccaactggtgaaacttgtgaagattacttgtccgattacattgcctcacaaggtacaggttatatcttagatccatccgctacagattcttgttctttgtgtccaatgtcctctaccgatgatttcattgcttccctgaaattgaactacgataacagatggcgtgatgtcggtatctttatcgctttcatctttttcaatatgatcatggccgtgttcttttactggttagctagagttcctaagaagtccgatagagttggtacagaacaacctaaagaagccgttaatatgggtgcacaaatggaaaacaatgctatgaatgctcacaagcacgatgatgttgttcaagacgaaaaattggacgaaggttccattgaaaagggtgagaattctgatgtctccaggtaa

SEQ ID NO: 1008 - protein, 1531 aa, Cyberlindnera americana
MTSIHDIEDASAEDVNRYDGYTNTVDSAVTELARQITNHSQSSFQDVPYKLAAGESEQDALSRVSTIAQGVNPMSDMSNIDPRLDPNSDEFNSRYWIKNFKALMDKDPDHYQNYSLGIAFKDLRAYGDATGADYQTTTLNAPMKFAVQYAKDIFSSKAAKMANKFDILKPLDGIIKPGEVVVVLGRPGAGCTTYLKTIAANTHGFDVGEESEISYDGLTSSEIKKHFRGEVVYNAESDIHFPHLTVWQTLTTAAKFRTPENRIPGVSREQYAEALTNVYMATYGLSHTKNTKVGSEIVRGVSGGERKRVSIAEVSLAGARLQCWDNATRGLDSATALEFIRALRTQADVLDTTALIAIYQCSQDAYDLFDKVSVLYEGYQIFFGKADKAKEYFVNMGWDCPARATTADFLTSVTSPREREPRAGFENKVPKTPEEFSIYWRNSPERAELLKEVETTLAQNNNSELKQSIYDAKHSRQSKRMRSSSPFTVSVLLQTKYLLAREVYRIKNDWGFHFFSMGANSLMALVLSSIFYNLPSTTSSFYYRGAAMFFACLFNGFSSFLEILSLFEARPIIEKHKQYALYHPSANALASVISQLPFKAFTALFFNLIFYFMVNFRRNPGRFFFYMLANVTATLTMSHFFRLIGSAASSLQEAVVPGHIVLLGLAMFVGFTLPVDYMLGWCRWINYINPLAYSFEALMANEFHDREFGCSAYLPGDPADHPSWSSDSWICNSVGAVAGEYTVSGDRYIELAYSYKNTHKWRNFGISIAFMIFFLVFYMVFSEYNESAKQKGEILLFQRSNLKKIKKEKGAINDVEAGNGREVVSQDESEEQQVDAIQAGTDIFHWRDVHYTVKIKSEYREILGGVDGWVKPGTLTALMGASGAGKTTLLDVLASRVTMGVVTGNMFVNGRLRDSSFQRSTGYVQQQDLHLSTATVREALRFSAYLRQPASVSKAEKDAYVEECIKILDMQKYADAIVGVAGEGLNVEQRKRLTIGVELAAKPKLLLFFDEPTSGLDSQTAWSICQLMRKLANHGQAILCTIHQPSAILMQEFDRLLFLARGGRTVYFGDLGKNCQVLIDYFESHGAPKCPGDANPAEWMLQVIGAAPGSHANQDYHQVWLNSKERQAVLDELDSMERELVSIPYDGDSKHSEFAAPFYVQLYVVTERVFQEFWRTPSYIWAKMFLSSISSLFIGFIFFKAKNTIQGLQNQMFALFMFLVVFNPLLQQTLPTFVNQRNLYETRERPAKTFAWQAFILSQIIAEIPWNIFVGTLGFFCFYYPPAFYQNAEPYHEVNARGAYAWFFSILFYVYIGTMAHMCMAPLDLVDSAGNLGSLLFTMCLNFCGVLVTKEAMPGFWVFMYRVSPFTYYIEGFLTNAVAHNDIVCADNEYRVLVPPTGETCEDYLSDYIASQGTGYILDPSATDSCSLCPMSSTDDFIASLKLNYDNRWRDVGIFIAFIFFNMIMAVFFYWLARVPKKSDRVGTEQPKEAVNMGAQMENNAMNAHKHDDVVQDEKLDEGSIEKGENSDVSR

SEQ ID NO: 1009 - DNA, 4866 bp, Tetrapisispora blattae
  source 1..4866: mol_type = other DNA
atgtccctgaactccaactccattaccaatagatctgttgtctctatgaacccatccgaacctatttctgaaaccgtttctcaacaaatctccgatgctaatgaatctgctactgaaactgcttcttctaacaatggtatgtctggttgcgaatcttccttgaatagatacaatggtttcgacgagaacatccagaagaacattcataacttggccatgtacttcaacaacctgtccatgaactctaaagagtcgttcaacaacaacactactactttgacttctccaacctcttctgatacctccattaacaacttggatactgtttctactgctaccacctctgcttctattttcagagtttacaccaacggtatcaacccaatcttggataacaacaagttggaacaacaaacttctaacggcactgaagtttctaccttgtacaacccatatatcgatccatctaacccacagttcaagtccaaaaagtggatccaaaacatggtcaacttgatcaacaacgaccagtcttactacaagccatatgaattgggttgttgctggactgatttgtgtgctatgggttctgatacaaacgatattacttaccagaccaccgtttttaacgctccatacaaatacgctaggttgttcttcaaccacttgaacagtaagagaagatcccaagccaagaaattcaagggtgttactatcttgcataagatggatggtttggttgaatctggtgagttgttggttgttttgggtagaccaggttctggttgtactactttattgaagtctttgaccggtaacacccatggtttcaagatttctcaagattccgaaatcacctacaacggcatttctcaaaagaagatcaaaaagaactacaggggtgatgttgtttacaacgctgaaaacgatatccatttgccacatttgactgtctaccaaactttgttgactgtcgctagattgaaaaccccacaaaacagattccacaacgtgtctagagaacaattcgctgatcatattacccaagttgctatggctacttatggtttgtctcataccagaaacactaaggttggtaacgatttggttagaggtgtttcaggtggtgaaagaaagagagtttctattgccgaagttttcatctgcggttctaagtttcaatgttgggataatgctaccagaggtttggatgctgctactgctttggaatttgttaaggccttgaaaactcaagcctctatcactaatgtttccgctgctgtttctatctatcaatgctctaaagatgcctacgacttgttcgataaggtttgtgtcttgtacgaaggttaccaaatctacttcggtactactaccaacgccaaaaagtacttcgaaaagatgggttactactgcatccaaagacaaactgttgctgatttcattaccggtatcaccaatccatccgaaagaatcattaaccgtaacttcattaaggccaagaagttcgttccacagactccaaaagaaatgaacgaatactgggagaacagcaaagagtacaagcacttgattgaagatatcgaagagtataaggtcaggcaaaaggctaacgaaaacgaacaaattgagaagatcagagaagcccatattgccaagcaatctaaaaaggctagaccagcttctccatacactgtttcttacttcatgcaggtcaagtacctgttgttgaggaatttttggaggatgaagaactcctcctctattaccttgtttcaagtttgtggtaacaccgccatgtctttgatttttggttctatgttctacaacgtcctgaagccaccatctactactcaatctttttactatagaggtgccgctatgttcttcgctgttttgtttaatgctttcagctccttgttggaaatcttcgctatctatgaagctagggaaattaccgaaaagcacagaacctactcactgtatcatccatctgctgatgctttggcttcaatcttgtctgaattgccaccaaagattattacctgcatctgcttcaacatcatctactatttcatggtgaacttcaagaggaacggtggtaatttcttcttctacctgttgattaacttcacctccgttttggctatgtcccatttgtttagaactgttggttccatgaccaagtctttgtctgaagctatggttccagcttccattttgttgttggctttgtctatgtacgttggtttcgccattccaaagactaagttgttaggttggtctaagtggatctggtacatcaatccattggcttacatgttcgaatccttgatggttaacgaattccataacaccaagttcgaatgcgctacttatattccaactggtccaggttacgaaaacatcttgccagatcaaagagtttgctctgttgttggtagtgttccaggtcaaaattacgttttgggtgatgactacttgagggaatcttacgactattacaacaaacataagtggcgtggtttcggtattggtttggcttacgttattttcttcttgggcgtctacttgctgttttgcgaaatcaatgaaggtgctaagcaaaagggtgagatgttgatttttccacacgatgtcttgaaaaagatgcacaaagaaggtcaaatccaggactcttcttcattggctatggattccgatttggaaaaaggtaatggtaacgactcatccttggatgtcaaaaactctagcatcaacaacattaccgactccatttctggtaacactttgactgaaaagcagcagttgaagggtacgaatttgactttggaagttcagccaactaccaactcctcttctaattcttccgaaaaggacattgaaaacaacgccgttatctccaagtccgaatctatttttcattggaagaacctgtgctacgacatcaatattaagggtgaaaacaggcgtatcttgtccaatgttgatggttgggttaagccaggtactttaactgctttgatgggtgcttctggtgctggtaaaactactttgttggattgcttagctgaaagaaccactatgggtatagttaccggtgatatgttcgttgacggtaaattgagagatgaatctttcccaagatctatcggttactgtcaacagcaagacttgcatttgaaaacctctaccgttagagaatccctgagattttctgcttatttgagacagccatactccgtgtccagaaaagagaaagaattatacgtcgaagaggtcatcaagatcctggaaatggaaaagtatgctgaagcaatagttggtgttcctggtgaaggtttgaatgtcgaacaaagaaaaaggttgaccatcggtgttgaattggctgctaagccaaagttgttgctatttttggatgaacctacctccggtttggattctcaaactgcttggtctatctgtaagctgatgagaaagttggctaatcatggtcaagctatcttgttcaccattcatcaaccatccgctattctgatgcaagaatttgataggttgctgttcctacagaaaggtggtaagactgtttactttggtgatttgggtaagagatgccaaaccatgattgattactttgaagctaacggtgctgacaagtgtccaaaagaggctaatccagctgaatggatgttggatgttgtcggtgctgctccaggttctattgctaatcaagattactacgaagtctggcgtaattcccaagagtatagagatgttcaagaagagttgaacaggttggaagaggaatttgctggtattgaaaaaccagtcggttctgaagaacacaacgaatatgctacacctttgctattccaaatcaagtacgttgtcttgaggttgttcgatcagtattggagatcaccaacttacttgtggtccaagtttttcttgaccatctacaacatgctgttcatcggtttcactttcttcaaggctgatttgagcttgcaaggtctgcaaaatcaaatgctgtctttgttcatgttcaccgtcattttcaacccattgatgcaacaatacttgccaatgtttgttcaacagagagacttatacgaagccagagaaagaccatctagaaccttttcttggatcacctttatcgtgtcccaaatcttggttgaagttccctggaactttttgtgtggtacaattgcctacttcatctattactactctgttggcttgtaccataatgcctctgttgcaaatcaattgcacgaaagaggtgctttgttttggttgttctcttgtgctttcttcgtgttcatctcctccatgtccattttggttatcagctttaacgaacatgatagaaacgctgctaacttgggttctttgatgttcactatgtctttggctttttgtggtgtaatggctggtccagatatttttccaagattctggatcttcatgtacagagtttctccactgacctactttatcgatggtttgttgtctacaggtttggctaatgctgatgttacttgtgctgattacgaattggtcagattctctccaccatcaggtatgacttgtggtgagtatatgcaaccctatatttctatggctggtactggttacttgactgatactgatgctactgatacctgtcatttctgcaatgtttctaagaccaacgacttcttgaagtccgtttcttctaaatactctagaaggtggcgtaactacggtatcttcttgtgtttcatcgtctttaacttcgttgcaggtattggtctatattggttggctagagttccaaaacaattcaggatcggtttgtttaagaggttcaagatcgactaa

SEQ ID NO: 1010 - protein, 1621 aa, Tetrapisispora blattae
MSLNSNSITNRSVVSMNPSEPISETVSQQISDANESATETASSNNGMSGCESSLNRYNGFDENIQKNIHNLAMYFNNLSMNSKESFNNNTTTLTSPTSSDTSINNLDTVSTATTSASIFRVYTNGINPILDNNKLEQQTSNGTEVSTLYNPYIDPSNPQFKSKKWIQNMVNLINNDQSYYKPYELGCCWTDLCAMGSDTNDITYQTTVFNAPYKYARLFFNHLNSKRRSQAKKFKGVTILHKMDGLVESGELLVVLGRPGSGCTTLLKSLTGNTHGFKISQDSEITYNGISQKKIKKNYRGDVVYNAENDIHLPHLTVYQTLLTVARLKTPQNRFHNVSREQFADHITQVAMATYGLSHTRNTKVGNDLVRGVSGGERKRVSIAEVFICGSKFQCWDNATRGLDAATALEFVKALKTQASITNVSAAVSIYQCSKDAYDLFDKVCVLYEGYQIYFGTTTNAKKYFEKMGYYCIQRQTVADFITGITNPSERIINRNFIKAKKFVPQTPKEMNEYWENSKEYKHLIEDIEEYKVRQKANENEQIEKIREAHIAKQSKKARPASPYTVSYFMQVKYLLLRNFWRMKNSSSITLFQVCGNTAMSLIFGSMFYNVLKPPSTTQSFYYRGAAMFFAVLFNAFSSLLEIFAIYEAREITEKHRTYSLYHPSADALASILSELPPKIITCICFNIIYYFMVNFKRNGGNFFFYLLINFTSVLAMSHLFRTVGSMTKSLSEAMVPASILLLALSMYVGFAIPKTKLLGWSKWIWYINPLAYMFESLMVNEFHNTKFECATYIPTGPGYENILPDQRVCSVVGSVPGQNYVLGDDYLRESYDYYNKHKWRGFGIGLAYVIFFLGVYLLFCEINEGAKQKGEMLIFPHDVLKKMHKEGQIQDSSSLAMDSDLEKGNGNDSSLDVKNSSINNITDSISGNTLTEKQQLKGTNLTLEVQPTTNSSSNSSEKDIENNAVISKSESIFHWKNLCYDINIKGENRRILSNVDGWVKPGTLTALMGASGAGKTTLLDCLAERTTMGIVTGDMFVDGKLRDESFPRSIGYCQQQDLHLKTSTVRESLRFSAYLRQPYSVSRKEKELYVEEVIKILEMEKYAEAIVGVPGEGLNVEQRKRLTIGVELAAKPKLLLFLDEPTSGLDSQTAWSICKLMRKLANHGQAILFTIHQPSAILMQEFDRLLFLQKGGKTVYFGDLGKRCQTMIDYFEANGADKCPKEANPAEWMLDVVGAAPGSIANQDYYEVWRNSQEYRDVQEELNRLEEEFAGIEKPVGSEEHNEYATPLLFQIKYVVLRLFDQYWRSPTYLWSKFFLTIYNMLFIGFTFFKADLSLQGLQNQMLSLFMFTVIFNPLMQQYLPMFVQQRDLYEARERPSRTFSWITFIVSQILVEVPWNFLCGTIAYFIYYYSVGLYHNASVANQLHERGALFWLFSCAFFVFISSMSILVISFNEHDRNAANLGSLMFTMSLAFCGVMAGPDIFPRFWIFMYRVSPLTYFIDGLLSTGLANADVTCADYELVRFSPPSGMTCGEYMQPYISMAGTGYLTDTDATDTCHFCNVSKTNDFLKSVSSKYSRRWRNYGIFLCFIVFNFVAGIGLYWLARVPKQFRIGLFKRFKID

SEQ ID NO: 1011 - DNA, 4497 bp, Zygosaccharomyces bailii
  source 1..4497: mol_type = other DNA
atggttgtcggttccgttgaacaacatccaggtggttattctgacgaaaatgcttatggtggtttcgatgaagctattaacggttccgtaaaagaattggccagatccttgattgaagagaacaaggattctaccaactccttcagtgaaagagaaaacaccgttgaaaacaacaccggtattaacccagttggtttacaaccatctgatgctgagtacaaaccagaattggatccatcttctaacgacttctcatctaaagcttggattggtaacttggctaaggttgttgtttctgatccagattactacaagccatacactgttggttgtggttggagaaatttgtctgctttgggtgcttctgctgatgttgcttatcaaactactgttgataacatgccctggaagattttgtcttggttgtatagaatggctaggccagctaaagaatctgataccttcgaaattttgaagccaatggatggtttggttaagccaggtgaattattggttgttttgggtagaccaggttcaggttgtactactttgttgaagtccatttcctctaacacccatggtttcaagattccaaaggatgctaccatttcttactcaggtttgtccccaaaggatatcatcaatcatttcagaggtgaagttgtctactgtccagaagctgatattcatttgccacatttgactgtgttccaaaccttgttgactgttgctagattgaaaaccccaagaaacagaatcagaggtgtttctagagaagcttgggctagacatgttactgaagttactatggctacttacggtttgtctcataccagaaataccaaggttggtaacgaattggttagaggtgttagtggtggtgaaagaaagagagtttctattgccgaagttaccatttgcggttctaagtttcaatgttgggataacgctactagaggtttggatgctgctactgctttggaatttgttagagccttgaaaactcaaaccgaaatcgttcattctgctggttgtgttgctatctaccaatgttctcaagatgcctacgatttgttcgataaggtttgcgttttacacggtggttaccaaattttctttggtccagctactaaggccaagtcttactttgaaagaatgggttactactgcccatctagacaaactacagctgatttcttgacttctgttacttctccagccgaaagaatcatcaacagagaattcactgaaaagggtattgctgttccacaaactgctgaagaaatgtccgattattggagaaactcccctgaataccaagaattgattgctgaagttgacgaaaccatctctcaagatcacgaaaagtccttggaagtcatccaagaatctcataacgctagacaatctaagagagctagaagggctgaaccatatactgtttcttacttcatgcaggtcaagtacctgatgattagaaacttctggcgtatcatcaactcctcttctattaccgttttccagatcatcggtaactctgttatggctttgttgttgggttctatgttctacaaggtcctgaagaaaagttctaccggtactttttactatagaggtgctgctatgttcttcgccattttgtttaatgccttcagctccttgttggagatcttctcattatatgaagctagaccagttaccgaaaagcacaagacttactcattatacagaccttccgctgatgcttttgcttctgttttgtctgaaattccagctaaggttttgaccgctgtttgtttcaatattgccttctacttcttggtgaacttcagaagagatgctggtagattcttcttctactttctgatcaacattatcgccgtgttcgttatgtctcatatgtacagatgtgttggctctttgactaacactttgactgaagctatggttccagcctctattttgttgttagctatggcaatgtacaccggttttgctattccaaagactaagatgttaggttggtctaagtggatttggtggattaacccattgtcctacttgttcgaatctttgatgggtaatgaattccacgaccaaaagttcccatgtaccacttttgttccaagaggtggtgattacgatcatgttacaggtactgaaagagtttgctctgttgttggttcaaaagctggtcaagattacgttttgggtgacgactacctgaaagaatcttatggctatttgatcaagcacaagtggcgtggttttggtgttggtatggcttacttgatcttctttttcttcctgtacttgttcttgtgcgaagttaatgaaggtgctaagcaaaagggtgagattttggtttttccaaggtccattgtcagaaagatgagaaagcagaacaagctgaaagaagaagatagggatccagaagatgttgaaaagattgctggttcttctggttctaccgataagatgttgttgaaggactcctccgaatccattgatgaagaaaatgaaccatctgccttaggtggttctcaagctatttttcattggaggaacttgtgctacgaagtccaaatcaaaggtgacactagaaggatcttgaacaatgttgatggttgggtaaaacctggtactttgacagctttaatgggtgcatctggtgctggtaaaactactttattggattgcttggctgaaagggttacaatgggtgtcattactggtgatattttcgtgaacggtaagatcagggatgaatctttcccaagatctattggttactgtcaacaacaagacctgcatttgaaaactgctaccgttagagaatcgttgattttctcagctatgttgagacagccaaagtctgttccagtttcggaaaagaaaaagtatgttgacgacgtcatccgtatcttggaaatggaacaatatgctgatgcagttgttggtgttccaggtgaaggtttgaatgttgaacagagaaaaagattgaccatcggtgttgaattggttgctaaacctaagctgttggtctttttggatgaacctacttccggtttagattctcaaactgcttggtctatttgccagctaatgaagaaattgtctaagcacggtcaagctatcttgtgcactattcatcaaccatccgctatgctaatgcaagaatttgatcgtttgctgttcttgcagaaaggtggtaatactgtttacttcggtgatttgggtaaagactgcaagaccatgattgactactttgaatctaatggtgctgatccatgtccacctgatgctaatccagctgaatggatgttggaagttgtcggtgctgctccaggtactcatgctaatagagattaccatgaagcttggaggaattctccagaatatcaagcagttcaacaagagttggacaggttggaaaatgagttgcaatccttggatgaagaggatggtgttgaaaaacataagtctttcgctaccgatgtgttcacccagattaagtttgtttccttcagattgcaacaacagtattggagatcaccacagtatttgtggtccaagttcttcttgactgttatctccgagttgttcatcggtttcactttctttaaggctgacagatccatgcaaggcttgcaaaatcaaatgttggctgttttcatgttcaccgttatctttaacgctatcttggagcaatacttgccaaactatgtagaacaaagggacttgtacgaagctagagaaagaccatctagaaccttttcatggttcgctttcatcgtgtcccaaattttggttgaagctccatggaatttcttggctggtactattgcttactttatctactactacccaatcggcttttaccaaaatgcttcagctgctggtcaattgcacgaaagaggtgctttgtttttcttgtggtctaccgctttttatgtttgggttggttctatggctttactggccaatagctttattgaacatgatgtttctgctgccaatttggccaacttgtgttttactttggctttgtctttttgcggtgttatgactactccagatgctatgcctcatttctggattttcatgtacagagtctctcccttgacctacttcattgatgctgttttggcagttggtattgccaacgttgatattgaatgctccaactacgaatttgtccaattcactccaccacaaggtagaacatgtggtgagtatatgcaagcctacttgaaatctgctggtacaggttatttgaaggatgcaaatgctacagctcaatgtttgttgtgtcctttgtccagaactaacgactacttgtctcaagttaactcccattattctcacagatggcgtaactacggtattttcatctgttacatcgtgttcaactatgttgctgccgttttcttgtattggttggctagagttccaaagaaggacacctttttcagcaagatcttcagtaagaagtaa

SEQ ID NO: 1012 - protein, 1498 aa, Zygosaccharomyces bailii
MVVGSVEQHPGGYSDENAYGGFDEAINGSVKELARSLIEENKDSTNSFSERENTVENNTGINPVGLQPSDAEYKPELDPSSNDFSSKAWIGNLAKVVVSDPDYYKPYTVGCGWRNLSALGASADVAYQTTVDNMPWKILSWLYRMARPAKESDTFEILKPMDGLVKPGELLVVLGRPGSGCTTLLKSISSNTHGFKIPKDATISYSGLSPKDIINHFRGEVVYCPEADIHLPHLTVFQTLLTVARLKTPRNRIRGVSREAWARHVTEVTMATYGLSHTRNTKVGNELVRGVSGGERKRVSIAEVTICGSKFQCWDNATRGLDAATALEFVRALKTQTEIVHSAGCVAIYQCSQDAYDLFDKVCVLHGGYQIFFGPATKAKSYFERMGYYCPSRQTTADFLTSVTSPAERIINREFTEKGIAVPQTAEEMSDYWRNSPEYQELIAEVDETISQDHEKSLEVIQESHNARQSKRARRAEPYTVSYFMQVKYLMIRNFWRIINSSSITVFQIIGNSVMALLLGSMFYKVLKKSSTGTFYYRGAAMFFAILFNAFSSLLEIFSLYEARPVTEKHKTYSLYRPSADAFASVLSEIPAKVLTAVCFNIAFYFLVNFRRDAGRFFFYFLINIIAVFVMSHMYRCVGSLTNTLTEAMVPASILLLAMAMYTGFAIPKTKMLGWSKWIWWINPLSYLFESLMGNEFHDQKFPCTTFVPRGGDYDHVTGTERVCSVVGSKAGQDYVLGDDYLKESYGYLIKHKWRGFGVGMAYLIFFFFLYLFLCEVNEGAKQKGEILVFPRSIVRKMRKQNKLKEEDRDPEDVEKIAGSSGSTDKMLLKDSSESIDEENEPSALGGSQAIFHWRNLCYEVQIKGDTRRILNNVDGWVKPGTLTALMGASGAGKTTLLDCLAERVTMGVITGDIFVNGKIRDESFPRSIGYCQQQDLHLKTATVRESLIFSAMLRQPKSVPVSEKKKYVDDVIRILEMEQYADAVVGVPGEGLNVEQRKRLTIGVELVAKPKLLVFLDEPTSGLDSQTAWSICQLMKKLSKHGQAILCTIHQPSAMLMQEFDRLLFLQKGGNTVYFGDLGKDCKTMIDYFESNGADPCPPDANPAEWMLEVVGAAPGTHANRDYHEAWRNSPEYQAVQQELDRLENELQSLDEEDGVEKHKSFATDVFTQIKFVSFRLQQQYWRSPQYLWSKFFLTVISELFIGFTFFKADRSMQGLQNQMLAVFMFTVIFNAILEQYLPNYVEQRDLYEARERPSRTFSWFAFIVSQILVEAPWNFLAGTIAYFIYYYPIGFYQNASAAGQLHERGALFFLWSTAFYVWVGSMALLANSFIEHDVSAANLANLCFTLALSFCGVMTTPDAMPHFWIFMYRVSPLTYFIDAVLAVGIANVDIECSNYEFVQFTPPQGRTCGEYMQAYLKSAGTGYLKDANATAQCLLCPLSRTNDYLSQVNSHYSHRWRNYGIFICYIVFNYVAAVFLYWLARVPKKDTFFSKIFSKK

SEQ ID NO: 1013 - DNA, 4515 bp, Hanseniaspora guilliermondii
  source 1..4515: mol_type = other DNA
atgtccgagtcctccattcaaaacttcactactgatttcgctaacgaagaggattcttacaatggtgatccagatgtttcctccgttagagatttggctagatctttcaccaatatcagcctgaactcttcctccttgtatgatattccattgaagaacgaggatggcaacttggatattgaggattctaagtacaactccaagttggacccaaattctccagattttaatgcccatttctggatgaagaacctgcacaagattagaaataccgatccagactactacaagtccactaatttgggtttagtctacaagaacttgtcctgcgttggtgaatcttctgatgttatgtaccaaaccaccttcatctccatcttgcaatattttgctgaaacgctgtacaagaagttgaggccatctaaaccagaagatatgttcaccattttgaagccaatggacggtattttgaaaccaggttctttgaacgttgttttgggtaaacctggttctggttgtactactctgttgaaaactattgctgcttctacctacggtttcgaagttgctaaagattccttcatgtcttacgatggtttggctccaaaggatattaacaaacactacagaggtgatgttgtctaccaagctgaaaccgatattcatttcccaaacttgactgtgttcgaaaccttgaaatctgttgctttgttgactactccacgtaacagaatcaaaggtttgaccagagatcaattcgctactcatatggctgaagctactatggctatgtatggtttgtctcataccagaaacactaaggtcggtaacgaattcattagaggtgtttcaggtggtgagagaaaaagagtttccatctgcgaaatctcattgatcaacggtaagatcgtttgctacgacaattcttctagaggtttggattctgcctctaccttgtctttcattaagtgtttgaaaaccgcctccattgctaatgatacaactgctgttgttgctatctaccaatgttctcaagaagcctacgatttgttcgataacgtcatcgttttggatcatggttaccagttgtataatggtccagctcaattggctaagcaatactttttggatatgggttatgtttgcccagacagacaaactactgctgatttcttgactgctatcacctctccaaaagaaaggatccagaacaaagaaatgctgtccagaggtattaagatcccatctactccagaggaaatgtacaaccatttcaagaagtcccaaatctaccaggacttgttgaagcaaatcgatgactacaactctaacatcaacgaagagacaaaagagaagttcattgcttctcatgctgctgctcaatctaaaagagctaaaccatcttccagctacagattgtcttacggcttgcaaatcaaatacttgttgcagagaaacttcaccaggatcaagaacgatattggcttgtctgttttcatcgtcttggccaattctttgatggctttggttattgcctctatgttctacaaggtcatgtaccatactgacacctccacatttttctttcgtggtggttctttgttttacgctatcctgtttaactccttcagctccttgttggaagttatgacattatacgaagccaggtccattatcgagaagcaaaagaatttggcaatgtaccatccatctgcagaagctattgcttccattttgtctcaattgccctctaagttgttgaccaacatctgtttcaacctgctgttttacttcctggctaacttgagaagagaaccaggaccattctttttctacctgttgttgaacttcacctgtgtcttgactatgtctcacttgttcagattcattggttctgctactaagtcttttccagaagccatggttccaggttcagttgttttgttggctttgacaatgtatgctggtttcgctattccaaagaccaaaatgttaggttggtctaagtggatctactggattaacccattgcagtacggttttgagtccttgatgatcaacgaattccacgacagaaacttcgaatgctctcaatatgttccaactggtggtgattacaactctgtttctttggattacaagacctgttcagctgttggtgctgttccaggtgaagattttgttaacggtgatcagttcctgaagttgtcatatggttattcccatggtcataagtggcgtggttttggtgttttggttggttttgctatcttcttcttctcgatctacttgttcttcaccgaattcaacgaatccgctaaacaaaagggtgagattatcttgttcccacagtctatcgttaggaagatcaaaaagcaaaacaagtacatgcagtcccatccagaagatttggaaaacccaattgattccaaggatagagccaacgaaaagtccatcattgataacgatgactccagatcttctgcctacaaatctaaggatgaatcctccttggactctgataacgttggtttgtcagaatcagaagctacattgcattggagagatttgtgttacgacatcaagattaagggtgaaaccagacgtatcttgaacaaagttgatggttgggttgccaagagatctattactgctttgatgggttcttctggtgctggtaaaactactttgttggattgcttggcttctagagttactatgggtgttgttactggtaagatcttggtcaatggtaagcaaagagataacagcttcccaagatctattggttactgtcaacaacaagacttgcatttgtctactgccactgttagagaatccttgagattttctgcttacttgagacaatccgctgccatctctaagaaagaaaaggacgaatacgttgagaacgtcatcaaaatcttggacatggaaaagtacgctcatgcagttgttggtgttatgggtgaaggtttaaatgtcgaacaacgtaagagattgaccatcggtgttgaattggctgctaaacctaagctgttgatgtttttggatgaacctacatctggtttggactctcaaactgcttggtctatttgtcagttgatgagaaagttggccaatcaaggtcaagctattttgtgcactattcatcaaccatccgccatcttgattcaagaatttgataggttgttgttcttgcagccaggtggtaagactgcttattttggtgacttaggtgatggttgtaagaccatgattaagtacttcgaatctaagggtgctgaaaagtgtccaccagatgctaatccagctgaatggatgttggatatagttcaagctagagattaccacgaagcttggagacagtctgatgaattcaaagaagttaagtccaccttggaagagatggaaagagaattgccaaagatccaaatgaccgaggataagtatactcatgcttcattcgctgcatctttttggttgcagtacaagttggttttcatcagggtcatgcaacaaaattggagaactccattttacctgtggtccaagtttttcttggtcgtctactccgaaattttcatcggctttactttcttcaaggccgatcataccttacaaggtctgcaaaatcaaatgttggccgttttcatgttcaccgtcttgtttaatccatacttgcaacaatacctgccagtgtttaagcaacaaagagacttgtacgaagcaagagaaagaccatctagaaccttttcttgggttgctttcattactgctcaaatggctgctgaaattccatctaattttgcctctggttgtttggctttcttctgttacttttacccaatcggtttctaccaaaacgcttccaattctggtcaattgtctgaaagatccggtctgttcttcttgtattctattgccttcttcatctacaccggttctttcgctgttttagttgcttctccatttgatgatccacaagctggtggtcatatttcctccattattttcactatggccttggcttttaacggtgtttttgtcggtccaaacgaaatgccaggtttttggaagtttatgtacagggtttctccaatgacctacttggttgacggtttgttgtctgttggtattgctaacaacaacgctgaatgctctacttacgaattcagatctatagtgccaccagaaaacatgacttgtggtgaatatttggacccatacttgaaagctgctggtactggttatttgttggactcaggtaatgctgaagtctgtaagttgtgttccgtttcttctaccaacgctttcttgtcatctgtctcttcaaagtattctagaaggtggcgtaacttcggtattttcttggcttacatcgttttcgattacgcctgtaccattttcgtttattggttggctagagtcccaaagaaatcctctagagtcaaagaacaatccgatgcttccgtcgaaaattccaagtctgatgttgaatcgaagaagaactaa

SEQ ID NO: 1014 - protein, 1504 aa, Hanseniaspora guilliermondii
MSESSIQNFTTDFANEEDSYNGDPDVSSVRDLARSFTNISLNSSSLYDIPLKNEDGNLDIEDSKYNSKLDPNSPDFNAHFWMKNLHKIRNTDPDYYKSTNLGLVYKNLSCVGESSDVMYQTTFISILQYFAETLYKKLRPSKPEDMFTILKPMDGILKPGSLNVVLGKPGSGCTTLLKTIAASTYGFEVAKDSFMSYDGLAPKDINKHYRGDVVYQAETDIHFPNLTVFETLKSVALLTTPRNRIKGLTRDQFATHMAEATMAMYGLSHTRNTKVGNEFIRGVSGGERKRVSICEISLINGKIVCYDNSSRGLDSASTLSFIKCLKTASIANDTTAVVAIYQCSQEAYDLFDNVIVLDHGYQLYNGPAQLAKQYFLDMGYVCPDRQTTADFLTAITSPKERIQNKEMLSRGIKIPSTPEEMYNHFKKSQIYQDLLKQIDDYNSNINEETKEKFIASHAAAQSKRAKPSSSYRLSYGLQIKYLLQRNFTRIKNDIGLSVFIVLANSLMALVIASMFYKVMYHTDTSTFFFRGGSLFYAILFNSFSSLLEVMTLYEARSIIEKQKNLAMYHPSAEAIASILSQLPSKLLTNICFNLLFYFLANLRREPGPFFFYLLLNFTCVLTMSHLFRFIGSATKSFPEAMVPGSVVLLALTMYAGFAIPKTKMLGWSKWIYWINPLQYGFESLMINEFHDRNFECSQYVPTGGDYNSVSLDYKTCSAVGAVPGEDFVNGDQFLKLSYGYSHGHKWRGFGVLVGFAIFFFSIYLFFTEFNESAKQKGEIILFPQSIVRKIKKQNKYMQSHPEDLENPIDSKDRANEKSIIDNDDSRSSAYKSKDESSLDSDNVGLSESEATLHWRDLCYDIKIKGETRRILNKVDGWVAKRSITALMGSSGAGKTTLLDCLASRVTMGVVTGKILVNGKQRDNSFPRSIGYCQQQDLHLSTATVRESLRFSAYLRQSAAISKKEKDEYVENVIKILDMEKYAHAVVGVMGEGLNVEQRKRLTIGVELAAKPKLLMFLDEPTSGLDSQTAWSICQLMRKLANQGQAILCTIHQPSAILIQEFDRLLFLQPGGKTAYFGDLGDGCKTMIKYFESKGAEKCPPDANPAEWMLDIVQARDYHEAWRQSDEFKEVKSTLEEMERELPKIQMTEDKYTHASFAASFWLQYKLVFIRVMQQNWRTPFYLWSKFFLVVYSEIFIGFTFFKADHTLQGLQNQMLAVFMFTVLFNPYLQQYLPVFKQQRDLYEARERPSRTFSWVAFITAQMAAEIPSNFASGCLAFFCYFYPIGFYQNASNSGQLSERSGLFFLYSIAFFIYTGSFAVLVASPFDDPQAGGHISSIIFTMALAFNGVFVGPNEMPGFWKFMYRVSPMTYLVDGLLSVGIANNNAECSTYEFRSIVPPENMTCGEYLDPYLKAAGTGYLLDSGNAEVCKLCSVSSTNAFLSSVSSKYSRRWRNFGIFLAYIVFDYACTIFVYWLARVPKKSSRVKEQSDASVENSKSDVESKKN

SEQ ID NO: 1015 - DNA, 4527 bp, Kazachstania saulgeensis
  source 1..4527: mol_type = other DNA
atgtcctcctctaccaactccgatgatgaatctggtagattgcatacttacaccggtattgatgctcaagctgaagctactattaagaacttggctagaactttgaccgctcagtctttgaactctatcaactcttctaacaacaacaacgaggattccacctctgttaacgatcatcaatccatcttctctaacttggaaggtatcaacccagttttgactaacccagaacaatctggttacgacgaaaaattggatcctacctctgattacttctcttctactgcttgggttaagaatatggccagattggctaaatctgatccagattactacaagccatactctttgggttgtgtttggaaagatttgactgcttctggtacttcctctgatgttgaatatcaagctactgctttgaacgctccattgaaagctttgtcttacttgtacagagaagtcaagccagtcaacgaagaaaactccttccaaatcttgaaagagatggaaggttgtattaacccaggtgagttgttggttgttttgggtagaccaggttctggttgtactactttgttgaaaaccatctccactaacacccatggtttccatgttggtaagaacgctactatttcttactctggtttcaccccaaaagagatcaaaaagcactatagaggtgaagttgtttacaacgccgaatccgatattcatttgccacatttgactgtctaccaaaccttgtacactgtctctagattgaaaactccacagaacagaatcaagggtgttgacagagatactttcgctagacatattaccgaagttgctatggctacttatggtttgtctcataccagagataccaaggttggtaacgatttggttagaggtgtttctggtggtgaaagaaagagagtttctattgccgaagtctctatttgcggttctaagtttcaatgttgggataatgctaccagaggtttggattctgctacagctttggaattcattagagccttgaaaactgatgctaccaccgttaattcttgttctactgttgctatctaccaatgctctcaagatgcttacgatttgttcgataaggtttgcgttttggaccaaggttaccaaatctattttggtccaggtactaaggctaaggcttactttgaaaagatgggttacgtttccccagatagacaaactactgctgatttcttgactgctgttacttctccagctgaaaggatcttgaatcaagagtacttgaagaagggtatctccattccacaaactccagaagatatgaacacttactggaagaactcccaagattacaaggatttgatggccgaaattgacgagaagttgaacaacaatgtcgaggactctagagaattggtcaaagaagctcatattgccaagcagtctaatagatctagaccatcttcaccatacaccgtcaattatttcttgcagatcaagtacctgctgaccagaaatgtttggagaatcaaaaacaacccctccgtcaatttgttcatggtttttggtaattcctccatggccttgattttgggttctatgttttacaaggttatgctgcacgattctacctctactttttactttagaggttccgctatgttcttcgccattttgtttaatgctttctcgtgcttgttggagatcttcacattatatgaagccagaccaattaccgaaaagcacaagacttacagcttgtatcatccatctgctgatgctttcgcctccattatttctgaattgccaacaaaagctgctatcgctgtttgcttcaacattatcttctatttcttggtcaacttcagaagaaacggcggcgatttctttttctacttgctgattaacatcgttgccgttttcgctatgtctcatatgtttagaactgttggtgctgctactagaacattgtctgaagctatgtttccagcctccatgttgttattggctatgtctatgtataccggtttcgctattccaaagaccaaaatgttaggttggtctgaatggatttggtacttgaatccattggcctacttgttcgaatccttgatgattaacgaattccacaacagagatttcccatgcgctcaatatgttccacaaggtccagcttatgttaatgctactggtactgaaagagtctgcatttctttgggtgctgttccaggtgaagattttgttaatggtgatgcttacattaaggccaactatggttatgaacataagcacaaatggcgtggttttggtgttggtatggcttttgctgttttcttcttgggtgcttatttggctgtttgcgaattcaatgaaggtgctaaacaaaagggtgagatcttggttttcccaaagtccattatccgtaagatgaagaagaatggtcaattgccacaaagagcaagaccagataagagagaagaagatatcgaaaagggtactaccgatgaatcttccgttaacgatagaaagttgttggaggactccgaaatttcttccgacgaaaacaaagaagagtccatcggtttgtctaagtctaccgctatttttcattggaggaacttgtgttacgacgtccaaatcaaagacgaaacgagaagaatcttgtccgatgttgatggttgggtaaaaccaggtactttgacagctttgatgggtgcttcaggtgctggtaaaactacattattgaactgtttggctgaaagggttaccatgggtactattactggtgatgttttcgttgacggtagattgagagatgaatcctttccaagatctatcggttactgtcaacaacaagacttgcatttgagaacctctaccgttagagaatctttgagattctctgcctatttgagacaaccatctgatgtttctaccgaagaaaagaacgcttacgtcgaagaaatcatcactatcttggagatggataactacgctgatgctatagttggtgtacctggtgaaggtttgaacgttgaacaaagaaaaagattgaccatcggtgttgaattggctgctaaacctaagctattggttttcttggatgaacctacatctggtttggatagtcaaacagcttgggctatttgtcagttgatgagaaaattggcttctcatggtcaagctattttgtgcactattcatcaaccatccgctatcttgatgcaagaatttgataggttgttgttcttgcaaagaggtggtaagactgtttacttcggtgaattaggtcatggttgccaaaagatgatcgactactttgaatctcatggttctcataagtgtccaccagaggctaatccagccgaatggatgttggaagttgtaggtgctgctcctggttcacatgctaatcaagattattacgaagtctggcgtaactccgaacattttaaagctgttcatgaagagttggacaggatggaaaaggatttgccaggtcaagcaaaagaagaggacgatccaactgctcacaaagaatttgctacaggtattccataccagatcaacttggtttctgaaaggttgttccaacaatattggagatccccacaatacttgtggtccaagtttatcttgacgatcttcaacatgctgttcatcggtttcactttcttcaaggctaacactagcttgcaaggtctacaaaacgaaatgttggccattttcatgttcaccgttatcttcaacccactgttgcagcaatacttgccaaattttgtcgaacagagagacttgtacgaagctagagaaagaccatccagaacattctcatggaaggcttttatcgtttcccagattttggttgaggtcttttggaatttcttggctggttctttggcttacttcatctactattacgccattggtttttaccacaatgcatctgttgctggtcaattacacgaaagaggtgctttgttttggttgttctcaactgcctttttcgtttactgtggttctatgggtacaatggccatctcctttattgaaattgctgaaaacgctgccaacatggcttcattgatgtttactatgtgtttgtccttctgcggtgttatggttactaaggatgctatgccaagattctggatcttcatgtatagagtttctcccttgacctacatgattgatgctttgttggctattggtgtcggtaacgttgatattgtctgtaccaagaatgaattcgtggaattcactccagctgctggtatgacttgtggtgaatatttggctccatacttggcttatgctggtactggttatttgagagataacaacgctactgatgtttgcggtttgtgtgaatactctagaactaacgattacttggctaccgttaatgctgaatatggtcaacgttggagaaactacggtattttcatctgctacatcttcattaacttcgccgctgctatcctattttactacttagctagagttcccaagaagcagaaaaagttgaaagccgaatga

SEQ ID NO: 1016 - protein, 1508 aa, Kazachstania saulgeensis
MSSSTNSDDESGRLHTYTGIDAQAEATIKNLARTLTAQSLNSINSSNNNNEDSTSVNDHQSIFSNLEGINPVLTNPEQSGYDEKLDPTSDYFSSTAWVKNMARLAKSDPDYYKPYSLGCVWKDLTASGTSSDVEYQATALNAPLKALSYLYREVKPVNEENSFQILKEMEGCINPGELLVVLGRPGSGCTTLLKTISTNTHGFHVGKNATISYSGFTPKEIKKHYRGEVVYNAESDIHLPHLTVYQTLYTVSRLKTPQNRIKGVDRDTFARHITEVAMATYGLSHTRDTKVGNDLVRGVSGGERKRVSIAEVSICGSKFQCWDNATRGLDSATALEFIRALKTDATTVNSCSTVAIYQCSQDAYDLFDKVCVLDQGYQIYFGPGTKAKAYFEKMGYVSPDRQTTADFLTAVTSPAERILNQEYLKKGISIPQTPEDMNTYWKNSQDYKDLMAEIDEKLNNNVEDSRELVKEAHIAKQSNRSRPSSPYTVNYFLQIKYLLTRNVWRIKNNPSVNLFMVFGNSSMALILGSMFYKVMLHDSTSTFYFRGSAMFFAILFNAFSCLLEIFTLYEARPITEKHKTYSLYHPSADAFASIISELPTKAAIAVCFNIIFYFLVNFRRNGGDFFFYLLINIVAVFAMSHMFRTVGAATRTLSEAMFPASMLLLAMSMYTGFAIPKTKMLGWSEWIWYLNPLAYLFESLMINEFHNRDFPCAQYVPQGPAYVNATGTERVCISLGAVPGEDFVNGDAYIKANYGYEHKHKWRGFGVGMAFAVFFLGAYLAVCEFNEGAKQKGEILVFPKSIIRKMKKNGQLPQRARPDKREEDIEKGTTDESSVNDRKLLEDSEISSDENKEESIGLSKSTAIFHWRNLCYDVQIKDETRRILSDVDGWVKPGTLTALMGASGAGKTTLLNCLAERVTMGTITGDVFVDGRLRDESFPRSIGYCQQQDLHLRTSTVRESLRFSAYLRQPSDVSTEEKNAYVEEIITILEMDNYADAIVGVPGEGLNVEQRKRLTIGVELAAKPKLLVFLDEPTSGLDSQTAWAICQLMRKLASHGQAILCTIHQPSAILMQEFDRLLFLQRGGKTVYFGELGHGCQKMIDYFESHGSHKCPPEANPAEWMLEVVGAAPGSHANQDYYEVWRNSEHFKAVHEELDRMEKDLPGQAKEEDDPTAHKEFATGIPYQINLVSERLFQQYWRSPQYLWSKFILTIFNMLFIGFTFFKANTSLQGLQNEMLAIFMFTVIFNPLLQQYLPNFVEQRDLYEARERPSRTFSWKAFIVSQILVEVFWNFLAGSLAYFIYYYAIGFYHNASVAGQLHERGALFWLFSTAFFVYCGSMGTMAISFIEIAENAANMASLMFTMCLSFCGVMVTKDAMPRFWIFMYRVSPLTYMIDALLAIGVGNVDIVCTKNEFVEFTPAAGMTCGEYLAPYLAYAGTGYLRDNNATDVCGLCEYSRTNDYLATVNAEYGQRWRNYGIFICYIFINFAAAILFYYLARVPKKQKKLKAE

SEQ ID NO: 1017 - DNA, 4347 bp, Lichtheimia ramosa
  source 1..4347: mol_type = other DNA
atgtgctaccactgcctgattttgttgtccagattcatcgattccctgattccaatcttgttcttgttgggttctttgacctttatcttgcaagcttggttgagatccagaagatcttttcattctgctgtttacgctccattgaagcaacatgttacatcttatggtactaccccatctttggaagaggatgaagatgatactccatcctcatctactattgcatctgaagagttgtacgatgtcccattgaatagatggtctatctacaacattaccagattggctggtactttgttgcaattgggtatttctgctggtgttttgagagctttgttggttcatgattacactttggacactaccgttgaaggttcttcttctaacgttttgacttcctctatgaccgattgtgtttattggggtagaccaatgtctactgaaatgtgggcttctatctactccaagtttatgttttcttgggttgccccaatgttgaaagaaggttatcaaagaactttgaacgccgatgatttggtcgaattgattccacaaaacagagctaagaacgtcttgcaaacttaccaacactataggtcaccatctttgttctggggtgttatcagaactttcaagaaagaattggccattcaagctttgtggtgtgttttatggaatgcttgtttgtttggtccaccagtgtttctgaacaagatcattaagtacatcgaaaacagacacccagatcaaccagtttctatggcttatgcttacgtcatcttgttgttcattacctctgcttctcaagctttagctttacaacaagccttgtacattggtagaactttgggtgttagaatccaagccattatagtcggtgaagttttctctaaagctttgcgtaaaagacagggtgatagagaagaaactgctcacgatgatgataacgacgaaaagaaagctgaatccaacgtcaacaacttgttgtccgttgattccttgagaatctctgattttatggcctactctttccagttgtacggttctgctattcaaatggttgtttcaggtgccctgttgtacaatttgttgggtactgctgctttgtggggtttaggtgttatggttttgacacaaccagttgctttcttggtgtctaagagattcgaaaaggttcaagaccaagttatgtctgctaccgataacagaatcaaaaaggtcaacgaattgctgtccgccattagaattatcaagtttttcgcttgggagaaagaattcaaaaagcgtgttatggacgccagggaaaaagaattgaaagttttgttggctaggctgtacatgcacgttcatactgttaatgtttggttcttcatccccatcctgattatgattactgttttctacgcttacaccaggactaatgatttgactgctgctactgcttttacagctttggctttgttcaacattttgagattcgccttggatgagttgccaatgtttattatgtgggcattgcaaggtagagtttccgctaaaagagtccaaaagtttttggccgaagaagaagttacttctccacaacctactgttatgcatgctgatattggtttcgttgataatgctgctttcggttgggaaaaagataaggccattatcaaggacctgaacttgtcttttccaaggggtaagttgtctgttatttgtggtccaactggttctggtaaaacaactttgttagcctccttgttaggtgaaacttactgtatgagaggtgctgctcatttgccaagaatagttccaaaatctaaagctccagttggtggtgctgcttctggtattgcttatgttgctcaaactgcttggttgcagaacagatctattagagacaatatcttgttcggcttgccatacgatgctgaaagatatgaacaagtgttgtacattactgccttgaccaaggatttggaaatcttcgaatatggtgactccaccgaaattggtgaaaaaggtgttactttgtctggtggtcaaaagcaaagaatggctattgctagagctgtttactctcaagccgaaaccattattttggatgattgcttgtctgctgttgatgctcatactgctaaacacttgtacgaacattgcatcactggtaacttgatgaaggatagaaccgttatcttggttacccatcatgttgcattgtgtttggattctgctgcatatgttgttgctatgaaggatggtcaagttttaggtgctggtgatccatctactgttttgaaatctggtgctttgggtgaagaattagctaacacttacgacgaggataggtcctctaagaaagaaagtgctggtgctactgatggtgctgttccattggttccagaaactgttgaattggataagaaagacggtactggcaaattggtaaaagaagaagagagagctgaaggttgggttccatggtcaatctatgaagcttatatctacgcttctggtggctatattttctgggccttgattttgattgccttctgcttgaatcaaggcgttattttctcacaagactactggattaaggtttggacatctgcttacgaaactaagaaccatgatttcggtttgttgaacgctttgggtactagatcctccatcttattgaacagcttgtccttgtcatctgtctctccaagtgaagaacctaatcaacaacaaagggttaacgtcatgtactacttgggtatctacaccttgattggtgtcatggctttattggctactactgctagatctttgatcgtttactacggtggtattagagcctctagaagattgcacgaaaagttgttgcataagatcttgagagccaaggttagattctttgattctactcctttgggcagaatcttgaacagattctctactgatatggaagccatcgatcaagaggtttctccaatggttgctttcgttttgttctctatggttaccatgttctgcgtcttgatcttggtttctacagttttgccagcattcttgattccaggtactttcattgctgtcgtgttcgtttttatcggcatgtattatttggccacctccagagatttgaagagattgaattctgtgtccagatctccaatctacgtccaattttctgaaaccttgaacggtgtttctaccattagagcttttggtgctcaaccacgtttcatcaaagaaaaccatgaattggtcgacaacaacaacagaccatttttgtggatgtgggctacaaacagatggttgcatagtagaatagaagttttgggttccgctgtctgtttctttactggtttggttattatgatcgccagatcctggattgatccaggtttggctggtttgtgtttgtcttatgctttacaattcaccgacaacttgatttgggttgtcagaggttatgctcagaacgaaatgaacatgaactctatcgaacgtgtgcaagagtacatggacattgaagaagaggctccagaacatattccagctacttgtccaccaaaatcttggccagaaacaggtgctgttaaggttgaagaattggaaatgagatactcccaagattctccagctgtcttgcatagaatttctttcgaaacaaagcccagagaaaaggttggtattgtcggtagaacaggttcaggtaaatctactttggccttgtctttgttcaggttcatggaagctagtcatggtagaattctgattgatggtgttgatatcgccaaccttggtttggaagatttgagatctagactgaccatcattccacaagatccagttttgttttccggtactttgaggtctaatttggatccatttggtcaacatgacgatgcagaattgtgggctgctttaaaaagatcccacttgattgatcaacaggatggtgacgaagagaagaagattaccttagattccgttgtcttggagaatggtaacaattggtcacaaggtcagagacaattgattgctttggctagagctttggttaagaagtccactttgatcatcttggatgaagctacctcttctgttgatttcgataccgatagaaagatccaagaaaccatcaggtctgaattggttcactcttctttgttgtgcattgcccatagaattagaactgttgccgattacgataggattttggttttggatcagggtagagtcaaagagtttgataccccatacaatttgatcaccaggcaagattccatcttcagacaaatgtgtcaaaggtctggtgaattcgaagagttattggaaattgcttctgccaaacattctgtcgcttga

SEQ ID NO: 1018 - protein, 1448 aa, Lichtheimia ramosa
MCYHCLILLSRFIDSLIPILFLLGSLTFILQAWLRSRRSFHSAVYAPLKQHVTSYGTTPSLEEDEDDTPSSSTIASEELYDVPLNRWSIYNITRLAGTLLQLGISAGVLRALLVHDYTLDTTVEGSSSNVLTSSMTDCVYWGRPMSTEMWASIYSKFMFSWVAPMLKEGYQRTLNADDLVELIPQNRAKNVLQTYQHYRSPSLFWGVIRTFKKELAIQALWCVLWNACLFGPPVFLNKIIKYIENRHPDQPVSMAYAYVILLFITSASQALALQQALYIGRTLGVRIQAIIVGEVFSKALRKRQGDREETAHDDDNDEKKAESNVNNLLSVDSLRISDFMAYSFQLYGSAIQMVVSGALLYNLLGTAALWGLGVMVLTQPVAFLVSKRFEKVQDQVMSATDNRIKKVNELLSAIRIIKFFAWEKEFKKRVMDAREKELKVLLARLYMHVHTVNVWFFIPILIMITVFYAYTRTNDLTAATAFTALALFNILRFALDELPMFIMWALQGRVSAKRVQKFLAEEEVTSPQPTVMHADIGFVDNAAFGWEKDKAIIKDLNLSFPRGKLSVICGPTGSGKTTLLASLLGETYCMRGAAHLPRIVPKSKAPVGGAASGIAYVAQTAWLQNRSIRDNILFGLPYDAERYEQVLYITALTKDLEIFEYGDSTEIGEKGVTLSGGQKQRMAIARAVYSQAETIILDDCLSAVDAHTAKHLYEHCITGNLMKDRTVILVTHHVALCLDSAAYVVAMKDGQVLGAGDPSTVLKSGALGEELANTYDEDRSSKKESAGATDGAVPLVPETVELDKKDGTGKLVKEEERAEGWVPWSIYEAYIYASGGYIFWALILIAFCLNQGVIFSQDYWIKVWTSAYETKNHDFGLLNALGTRSSILLNSLSLSSVSPSEEPNQQQRVNVMYYLGIYTLIGVMALLATTARSLIVYYGGIRASRRLHEKLLHKILRAKVRFFDSTPLGRILNRFSTDMEAIDQEVSPMVAFVLFSMVTMFCVLILVSTVLPAFLIPGTFIAVVFVFIGMYYLATSRDLKRLNSVSRSPIYVQFSETLNGVSTIRAFGAQPRFIKENHELVDNNNRPFLWMWATNRWLHSRIEVLGSAVCFFTGLVIMIARSWIDPGLAGLCLSYALQFTDNLIWVVRGYAQNEMNMNSIERVQEYMDIEEEAPEHIPATCPPKSWPETGAVKVEELEMRYSQDSPAVLHRISFETKPREKVGIVGRTGSGKSTLALSLFRFMEASHGRILIDGVDIANLGLEDLRSRLTIIPQDPVLFSGTLRSNLDPFGQHDDAELWAALKRSHLIDQQDGDEEKKITLDSVVLENGNNWSQGQRQLIALARALVKKSTLIILDEATSSVDFDTDRKIQETIRSELVHSSLLCIAHRIRTVADYDRILVLDQGRVKEFDTPYNLITRQDSIFRQMCQRSGEFEELLEIASAKHSVA

SEQ ID NO: 1019 - DNA, 4476 bp, Wickerhamomyces mucosus
  source 1..4476: mol_type = other DNA
atgtccaaccagggtgatcatcacttgaacaatgatttggttgatgacgacatcgaaagataccatggtttcgattctcaagtcaacgaacaaattaccaacttggctagacaattcaccaacgtttctgctcaagaggctgaaaaagaagatgaaggcgttgaagctttgtctagagtttctactgttgctgctggtgttgatttcatcaacaacgttgataacgatccaagattggacccaaacaacgatcaattcaattccagattctggatcaaaaacatgaaggccttggttgataatgacccagattactacaagacctactctttgggtattacctacaaggatttgagagcttatggtgttgctactgatgctgattaccaaactactgttgttaacggcttgattaagaacgctaacaacgctttcagatacctgaccgaatctaaagagactaagaagaacaagtacttcaacatcttgaagccaatggatgccttgattcaaccaggtgaattggttgttgttttaggtagaccaggttctggttgttctactctgttgaaaactattgcctctaacactcatggtttccacattggtgaagaatccgttatttcttacgaaggcttgaccccaaaagaaatcaaagctcattatagaggtgaggttgtttacaacgccgaatccgatattcatttcccacatttgactgttggtcagactttgaaaaacgctgctaaattcagaaccccaagaaacagaattccaggtgtttctagagatcaatacgctgaatgtatgaccgatgtttacatggctacttatggtttgtctcataccaagaacactaaggtcggttcagaattggttagaggtgtttcaggtggtgaaagaaagagagtttcaattgccgaagtttctttggctggtgctagattgcaatgttgggataatgctactagaggtttggatgctgctactgctttggaattcattagagctttgagaacctccgctgatattttggatacaactgctttagttgccatctaccaatgttctcaagatgcctatgatctgttcgataaggtttctgtcttgtacgaaggttaccaaatcttcttcggtagagttgaagatgccaagcaatactttttgaacatgggttatgattgcccagctagacaaactacagctgatttcttgacttctattacctccgcctctgaaagaattgctagatctggttttgaaaacaaggtcccaaaaactccagctgaattcgaacaatattggagacaatctccagagtacacccaattgatttccgatatcgattccaacttgatccaggccaaagaatctaacattgcccaagatattaagatcgctcataacgctaagcagtccaagagaatgagacattcttctccatacactgtttcttttgctatgcagaccaagtacctgttgatcagagaataccagagaatctacaacgatgttttcgttactgccttctccgtctttttcaactctttgatgtctctggtcctgtcctctattttctataacttgcaacaaaacaccgacagcttttacaaaaggggtgctgctatgtttttcagcgttttgtttaacggtttcctgtccttcttggaaatcatgactttgtttgaagccagaccagttgttgaaaagcacaagcaatattcgttgtaccatccatcagctaatgctttggcttctgtcatttctcagattcctttcaagttggttacctccttggctttcaacctgattttctacttcatggtccacttcagaagagaaccaggtagatttttcttctacatgctgatgaacttgactgctactttcgctatgtcccatttgtttagattgtgtggttctgctgcttcttcattggctgaagctatagttccagctcactttttgttgttggctttgactattttcgtcggctttaccattccagtcaactatatgttaggttggtccagatggatcaactacttggatccattagcttacgctttcgaagctttgatggctaacgaattttctggtttggaatacgcttgctcctcttatattccagctgctccaaatggtattactgaaggtgatactcattacgtctgtaatgctgttggtgctgttccaggtaaatcttttgtttctggtactagatacttggaggttgcctacaagtataccaattctcataagtggcgtgacttcggtattttgttaggtttgactttattcccattgggcgtctacatgttcttgtctgagtataatgaatccgccaagcaaaagggtgaagtcttgttgtttcaaaggtctaccttgaaggacatcaaaaagaacaacaaggtcatcaacgatatcgaagctggtgacgaaaaagatgtttccttgcaagatgaatccacagaaggtgacattaaggctttagatgctggtaaggatatcttccattggagagatgttagatacaccgtccagatcaagaaagaagaaagacaaatcttgtccggtgttgatggttgggttaagccaggtactttgactgctttaatgggtgcttctggtgctggtaaaactaccttgttggatgttttggctaacagagttactatgggtgttgttactggtgatatgttcgttaacggtagattgagagactcctcattccaaagatctactggttacgttcaacaacaggacttgcacttgcaaactgctactgttagagaagccttgaagttttctgcttacttgagacaacctagagatgtcactagagaagaaaaggataactacgtcgaagaagtcatcaagattttggagatggaaaagtacgctgatgctgttgttggtgttgccggtgaaggtttgaatgttgaacaaagaaaaaggttgaccatcggtgttgaattggctgctaaacctaagttgttgctgtttttggatgaacctacctccggtttggattcacaaactgcttggtctatttgccagttgatgagaaagttggctaatcatggtcaagctattttgtgcactatccatcaaccatccgcaattttgatgcaagaattcgataggttgctattcttagctagaggtggtaagactgtttactttggtgatttgggtaagaactgccaaaccttgattgattactttgagaaatacggtgctccaaagtgtccaggtgatgctaatccagcagaatggatgttgcatgttattggtgcagctccaggttctcatgctaatcaagattatcatgaagtctggctgaactccactgaaagacaagctgttttagatgagttggactacatggaaagggaattagttaagatcccagttgataactccgtggacaattatgaatttgctgctccattcactacccaatacgctatcgttaccaaaagagtgtttcagcagtattggagaactccaatctacatctggtccaagttgtttttggctactgttccatctttgttcttgggttttgctttctttaaggccaccaattcattgcagggtttccaaaatcaaatgttcgccctgtttatgttcctggtcacttttaatcctttggtccaacaaattatcccagcctttgttgttcagagggacttatacgaaactagagaaagaccatctaagaccttttcttggattgccttcattttgtctcaattcactgctgaattgccatggaatgcatttgttggtactatcgctttcttcgtgttttattacccagtcggtttttacaacaacgccaagtatgatcatttgaccaatgagagaggtgcttacgcctggtttttcactgttttattctacgtctactccggttctatggctcatttgttgattagcccaattcaaattgctgatgcagcaggtaatttgggctctttgttattcactatgtccttgaatttctgcggtgttttagtaggtcctactcaatttccaggtttctggattttcatgtacagagtttcaccattcacctacttcatcgatggtttcttgtcaaatgctttagctcataccaccgttcaatgttcagctgcagaattagtaactatggaacctactgctggtttgacatgtggtgattatctgtcatcttacattgctgctgcaggtactggttatgtaaacaatccagatgctacttctgcttgccaattttgctctgtttcaacttctgatgcctacctgaaactgatctctttgtcttactctagaaagggtagaaacatgggtgttttcgtcgcttacattttcattaactgggccttagctatcttcttctattggttggctagagtccctaagaaaaacaatagagtcaaggatgagagggaccctaacaagaaaaagtcagagatcaaagaatga

SEQ ID NO: 1020 - protein, 1491 aa, Wickerhamomyces mucosus
MSNQGDHHLNNDLVDDDIERYHGFDSQVNEQITNLARQFTNVSAQEAEKEDEGVEALSRVSTVAAGVDFINNVDNDPRLDPNNDQFNSRFWIKNMKALVDNDPDYYKTYSLGITYKDLRAYGVATDADYQTTVVNGLIKNANNAFRYLTESKETKKNKYFNILKPMDALIQPGELVVVLGRPGSGCSTLLKTIASNTHGFHIGEESVISYEGLTPKEIKAHYRGEVVYNAESDIHFPHLTVGQTLKNAAKFRTPRNRIPGVSRDQYAECMTDVYMATYGLSHTKNTKVGSELVRGVSGGERKRVSIAEVSLAGARLQCWDNATRGLDAATALEFIRALRTSADILDTTALVAIYQCSQDAYDLFDKVSVLYEGYQIFFGRVEDAKQYFLNMGYDCPARQTTADFLTSITSASERIARSGFENKVPKTPAEFEQYWRQSPEYTQLISDIDSNLIQAKESNIAQDIKIAHNAKQSKRMRHSSPYTVSFAMQTKYLLIREYQRIYNDVFVTAFSVFFNSLMSLVLSSIFYNLQQNTDSFYKRGAAMFFSVLFNGFLSFLEIMTLFEARPVVEKHKQYSLYHPSANALASVISQIPFKLVTSLAFNLIFYFMVHFRREPGRFFFYMLMNLTATFAMSHLFRLCGSAASSLAEAIVPAHFLLLALTIFVGFTIPVNYMLGWSRWINYLDPLAYAFEALMANEFSGLEYACSSYIPAAPNGITEGDTHYVCNAVGAVPGKSFVSGTRYLEVAYKYTNSHKWRDFGILLGLTLFPLGVYMFLSEYNESAKQKGEVLLFQRSTLKDIKKNNKVINDIEAGDEKDVSLQDESTEGDIKALDAGKDIFHWRDVRYTVQIKKEERQILSGVDGWVKPGTLTALMGASGAGKTTLLDVLANRVTMGVVTGDMFVNGRLRDSSFQRSTGYVQQQDLHLQTATVREALKFSAYLRQPRDVTREEKDNYVEEVIKILEMEKYADAVVGVAGEGLNVEQRKRLTIGVELAAKPKLLLFLDEPTSGLDSQTAWSICQLMRKLANHGQAILCTIHQPSAILMQEFDRLLFLARGGKTVYFGDLGKNCQTLIDYFEKYGAPKCPGDANPAEWMLHVIGAAPGSHANQDYHEVWLNSTERQAVLDELDYMERELVKIPVDNSVDNYEFAAPFTTQYAIVTKRVFQQYWRTPIYIWSKLFLATVPSLFLGFAFFKATNSLQGFQNQMFALFMFLVTFNPLVQQIIPAFVVQRDLYETRERPSKTFSWIAFILSQFTAELPWNAFVGTIAFFVFYYPVGFYNNAKYDHLTNERGAYAWFFTVLFYVYSGSMAHLLISPIQIADAAGNLGSLLFTMSLNFCGVLVGPTQFPGFWIFMYRVSPFTYFIDGFLSNALAHTTVQCSAAELVTMEPTAGLTCGDYLSSYIAAAGTGYVNNPDATSACQFCSVSTSDAYLKLISLSYSRKGRNMGVFVAYIFINWALAIFFYWLARVPKKNNRVKDERDPNKKKSEIKE

SEQ ID NO: 1021 - DNA, 4533 bp, Tetrapisispora phaffii CBS 4417
  source 1..4533: mol_type = other DNA
atgtccgaattggacaaggactcctcttctaatgtttcttctgcctccgatcatatctcttacaatggttttgacgaaaaggccgacaagagaattagacaattggctcaacaattgaccagaacctctactaatttggatacccaagatgtcaacggtaacaacaacaacgatgttcaatctaccgtgtccagatccattttctctgacagtttgttgaaagaaggtgtcaacccagttttcaccgatattaacgatccaaactacaacgaaaagctggacccaaattctgacaacttctcttcttatgattgggtcaagaacatctccaatttggctaatgctgatccagattactacaagccatacaagttgggttgttcttggaagaatttgactgctgaaggtaactcctctgatgtctcttatcaatccactgttttgaacctgccattgaagttggctactttgggttattacttgttgtcatctggtgccaacaagaaggttcaaatcttgaaatctgttgacggtttgattaagccaggtgagttgttggttgttttgggtagaccaggttcaggttgtactactttgttgaagtctattacctctaacacccacggtttccaattgactgatgaatccgaaatttcctacgatggtttgaccccaaaagagatcaaaaagcactatagaggtgatgttgtttacaacgctgaagccgatattcatttgccacatttgactgttttccaaaccttggttactgtcgctaagttgaaaactccacagaatagattcaagggtgtcaccagagaacaattcgctgatcatgttactgatgttactatggctacttacggtttgttgcataccagaaataccaaggttggtaacgatttggttagaggtgtttctggtggtgaaagaaagagagtttctattgccgaagttaccatttgcggttctaagtttcaatgttgggataacgctactagaggtttggattctgctactgctttggaattcattagagccttgaaaacacaagccgtcttgcaaaacactgctgctactgttgctatctaccaatgttctcaagatgcctacgatttgttcgataaggtttgcgttttggatgaaggttaccagttgttttacggctcatcttctaaggccaaagaatttttcatcaagatgggttacatttgcccaccaagacaaactactgctgatttcttgacttctgttacctctccagttgaaaggatcttgaacgaagaatacttggctaagggtatcaagattccacaaactcctagagacatgagcgaatattggagaaattctcaagagtacagagacttgatcagagaaatcgatgagtacaacgctcaaaacaacgacgaatccaagcaaattatgcatgatgctcatgttgctacccaatctagaagggctagaccatcttctccatatactgtttcttatggcttgcagatcaagtacatcttgactagaaacatctggcgtatgaagaactccttcgaaattactggtttccaggtttttggtaactctgctatggctttgattttgggctctatgttctacaaggttatgttgcatccaactaccgataccttttattacagaggtgctgctatgttcttcgccgttttgtttaatgccttctcatccttgattgagatcttcaccttgtatgaagctagaccaattaccgaaaagcacaagtcctactcattataccatccatctgctgatgctttcgcctccattatttctgaaattcctccaaagttgatcacctccgtttgcttcaacattatcttctactttctgtgcaacttcagacgtaatggtggtgttttcttcttctactacctgatttctatcgttgctgtttttgccatgtctcacttgtttagatgtgttggttctttgaccaagaccttgcaagaagctatggttccagcttctatgttgttattggctttgtctatgtacaccggtttcgctattcctagaactaagattttaggttggtccatctgggtttggtacattaacccattggcttacttgttcgagtccttgatgattaacgaattccatggtagacatttcccatgcactgcttatattccagctggtggttcttacgattctcaaactggtactaccagaatctgttctgttaatggtgctattgctggtcaagattacgttttgggtgacgattacatcaaatcctcttatgcttacgaacacaaacataagtggcgtggttttggtgttggtatggcttatgttgttttctttttcgtcgtctacttggtcatttgcgagtataatgaaggtgctaagcaaaagggtgagatcttggtttttccaagatccgttgttaagaagatgaagaaagctaagaccctgaacgactcttcttcaaacgtttctgatgttgaaaaggccacctccgaatctatttctgataagaagttgctggaagagtcctctggttcttttgatgattcttccgaaagagagcacttcaacatctctaaatcttccgctgtttttcactggcgtaacttgtgttatgatgtccaaatcaagtccgaaaccagacgtattttgaacaatgttgatggttgggttaagcctggtactttaactgctttgatgggttcttctggtgctggtaaaactactttattggattgcttggctgaaagggttaccatgggtgttattactggtgatatttttgtggacggtttgccaagagatacttcattcccaagatctatcggttactgccaacaacaagacttgcatttgactactgctaccgttagagaatccttgagattttctgctgaattgagacaaccagccgatgtttctgtttctgaaaaacatgcttacgtcgaagaggtcattaagattttggagatggaaaagtacgctgatgctgttgttggtgttgctggtgaaggtttgaacgttgaacaaagaaaaagattgaccatcggtgtagaattggctgctaaacctaagttgttagttttcttggatgaacccacttcaggtttggactctcaaacagcttggtctatttgtcagctaatgaagaagttggccaagttcggtcaagctattttgtgtactattcatcaaccatccgccatcctgatgcaagaattcgatagactgttgttcctacagaaaggtggtaagactgtttactttggtgaattgggtgataactgcaccaccatgattgattactttgaaagaaacggtgctcataagtgtccaccagatgctaatccagctgaatggatgttggaagttgtcggtgctgctccaggttctcatgcttcacaagattacaatgaagtctggcgtaattccgatgagtatagagctgttcaagaggaattggattggatggaatctgaattgccaaaacaagctactgaaacttctgcccacgaattattggaattcgcttcttctttgtggatccaatatgttgctgtctgcattaggttgttccaacaatattggcgtaccccatcttacatttggtctaagtttttggtcaccatcttcaacgctttgttcatcggttttactttcttcaaggctgacagaacattgcagggtttacaaaatcagatgttggccattttcatgttcaccgttattacgaacccaatcttgcaacaatacttgccatctttcgttactcagagagacttatacgaagctagagaaagaccatccagaacattctcttggaaggcttttattgctgcccaaatctctgttgaaatcccatggtcaattttggccggtactctatatttcctgatctactattacgccatcggcttttacaacaatgcttctgctgctgatcaattgcacgaaagaggtgctttgttttggttattttcttgcgccttcttcgtctacatcgtttctttgggtactttggtcattgccttcaatcaagttgctgaaactgctgctcatttggcttcattgatgtttaccatgtgcttgtctttcaacggtgtcttagttacttctgctaagatgccaagattctggatcttcatgtatagggtttctccattcacctacttcgttgatgctttattgtctaccggtgttgctaacgttgaagttcattgtgctgattacgaattgagaaagttcactccaccatctggtttgacttgtggtgagtacatggatccttatatttctgctgcaggtactggttatttgactgatccaaacaataccgaaacctgctctttctgtcaaatttctgacaccaatactttcttggcctctgttggttcatcttatcatagacgttggagaaacttcggtatcttcatttgtttcattgccatcaactacatcggcggcattttcttttattggttgtctagagttccaaagggctccaaaaagatgaagtctaagtga

SEQ ID NO: 1022 - protein, 1510 aa, Tetrapisispora phaffii CBS 4417
MSELDKDSSSNVSSASDHISYNGFDEKADKRIRQLAQQLTRTSTNLDTQDVNGNNNNDVQSTVSRSIFSDSLLKEGVNPVFTDINDPNYNEKLDPNSDNFSSYDWVKNISNLANADPDYYKPYKLGCSWKNLTAEGNSSDVSYQSTVLNLPLKLATLGYYLLSSGANKKVQILKSVDGLIKPGELLVVLGRPGSGCTTLLKSITSNTHGFQLTDESEISYDGLTPKEIKKHYRGDVVYNAEADIHLPHLTVFQTLVTVAKLKTPQNRFKGVTREQFADHVTDVTMATYGLLHTRNTKVGNDLVRGVSGGERKRVSIAEVTICGSKFQCWDNATRGLDSATALEFIRALKTQAVLQNTAATVAIYQCSQDAYDLFDKVCVLDEGYQLFYGSSSKAKEFFIKMGYICPPRQTTADFLTSVTSPVERILNEEYLAKGIKIPQTPRDMSEYWRNSQEYRDLIREIDEYNAQNNDESKQIMHDAHVATQSRRARPSSPYTVSYGLQIKYILTRNIWRMKNSFEITGFQVFGNSAMALILGSMFYKVMLHPTTDTFYYRGAAMFFAVLFNAFSSLIEIFTLYEARPITEKHKSYSLYHPSADAFASIISEIPPKLITSVCFNIIFYFLCNFRRNGGVFFFYYLISIVAVFAMSHLFRCVGSLTKTLQEAMVPASMLLLALSMYTGFAIPRTKILGWSIWVWYINPLAYLFESLMINEFHGRHFPCTAYIPAGGSYDSQTGTTRICSVNGAIAGQDYVLGDDYIKSSYAYEHKHKWRGFGVGMAYVVFFFVVYLVICEYNEGAKQKGEILVFPRSVVKKMKKAKTLNDSSSNVSDVEKATSESISDKKLLEESSGSFDDSSEREHFNISKSSAVFHWRNLCYDVQIKSETRRILNNVDGWVKPGTLTALMGSSGAGKTTLLDCLAERVTMGVITGDIFVDGLPRDTSFPRSIGYCQQQDLHLTTATVRESLRFSAELRQPADVSVSEKHAYVEEVIKILEMEKYADAVVGVAGEGLNVEQRKRLTIGVELAAKPKLLVFLDEPTSGLDSQTAWSICQLMKKLAKFGQAILCTIHQPSAILMQEFDRLLFLQKGGKTVYFGELGDNCTTMIDYFERNGAHKCPPDANPAEWMLEVVGAAPGSHASQDYNEVWRNSDEYRAVQEELDWMESELPKQATETSAHELLEFASSLWIQYVAVCIRLFQQYWRTPSYIWSKFLVTIFNALFIGFTFFKADRTLQGLQNQMLAIFMFTVITNPILQQYLPSFVTQRDLYEARERPSRTFSWKAFIAAQISVEIPWSILAGTLYFLIYYYAIGFYNNASAADQLHERGALFWLFSCAFFVYIVSLGTLVIAFNQVAETAAHLASLMFTMCLSFNGVLVTSAKMPRFWIFMYRVSPFTYFVDALLSTGVANVEVHCADYELRKFTPPSGLTCGEYMDPYISAAGTGYLTDPNNTETCSFCQISDTNTFLASVGSSYHRRWRNFGIFICFIAINYIGGIFFYWLSRVPKGSKKMKSK

SEQ ID NO: 1023 - DNA, 4482 bp, Kazachstania exigua
  source 1..4482: mol_type = other DNA
atggacgaggactttaagaagttcgccaactttcaaatgtacaacggtgttgattcttccaccgaagaaaccattaagaacttggctaaggatatctccgttaactccggtttgaagatcgaaaactacactacctcctcatccaaagaagtcgaatccattttgtctgatttggaaggtgttgatccaactgctaaagacttgcaagatcaaagattgaacccatcttgtgacaccttctcttcatctttgtgggttaagaatttggccgccattattaacaacaacccagagtattacaagccctactctttggattgcatttggcaaaatttgtccgcttacggtgaaacctctggtattgaatctcaagccaatttgattaacgccccacaaaagattatcaactccgtttacagaactgtcaagccagtcaagaaagaaaagtccttcaccatcttgaaagagatggaaggttgtattaacccaggtgagttgttggttgttttgggtaaaccaggttctggttgtactactttgttgaagtccatttccaacaacaccaacggtttcaagattaccaaagacaccaaattgtcttacgctggttttaccccaagagaaatgaaggctcattatggtggtgaagttatctacaatggtgaaatcgatgtccacttgccaaagttgactgtttatcaaaccttgtacaccgtcgctagattgaaaactccacataacagaattcaaggtgtcgacagagatattttcgctaagtacttgactgatgttaccatggctacttatggtttgtctcataccagagataccatcatcggtaacgatttgattagaggtgtttcaggtggtgaaagaaagagagtttctattgctgaaaccgctatttgtggtgctaaattgcaatgttgggataacgctactagaggtttggattctgctgctgctttagatttcattagagccttgagagttaacgccaataccatgggtgcttcatctgctgttgctatctatcattgctctgaaggtgcttactctttgttcgataaggtctgcattttggatcaaggttaccagttgtttttcggtccagctaatgatgctaagcaatactttgaacaaatgggttacgtttgcccagatagacaaactactgctgatttcttgacctctgttacttctccagaagaaagagttttgaacaaggacttcttgaagaagggtattgccattccacaaacgcctaaagaaatgaacgaatactggcgtaagtctcaagcttactctgaattgactcacgaaattcaagccaagttgtccaagaacgttgaagaatctagaaaggttattaaggctgctcatttggctaaacaatccggtaaatgtagagaatcttctccatacaccgtcaactacagattgcagatcaaatacttgctgtccagagaaatttggaggatcactaattacccaaccaccaacattttgatgttgttgggtaactctgctatggccttgattttgggttctatgttctacaagatcatgaagaaggatgacaccgagtctttttactttagaggtgctgctatgttctctgccactttgtttaatgctttcagctgtttgttggaggtgttctccttgtatgaatccagaccaattatcgaaaagcacaagacctacagcttgtatcatccatctgctgatgcattcgcctccattatttctagagttccagttaagattgccattgccatctgtttcaacgtcgtgttctactttttggtccactttaaaagagatgccggctcattcttcttctatttcttgattaacctggtcaccgtgttctccatgtctcatatgtatagaaccttcggttccatcactagatctttgccagaagctatgtttccagctgctgttttgttgttggctatggctatgtatactggtttcgctattccaagaactcaaatgttaggttggtctacctggatttggtacattaacccattggcttacttgttcgaatccttgatggttaacgaattccacggtagagaatttgaatgctctacctttattccaatgggctctatgtacgctaattacaccggtaaccatagaatttgtgctgctttgggtgctattgctggtgaagattatgttttaggtgacgactacatcagaaacaactacggttatgaacattcccataagtggcgtggttttggtattggtataggttactctgtgttcttcttgatcacctacttgatcgtttgcgaattgaatcctggtaagactcaaaagggtgagattttgatatacccacagcacatcatcagaagattgaggaagcaaaaagagtctaagggttctaccgattacaactcttctgacttggaagctggttcttctgattcctctattaccgatattaccctgctggaagatccaaaagaattggaagaagagtctttcaactacaccggtttgtctactgctaacaatgttttccattggagaaacgtttgctacgacatcgaaactaagaacgagactaagaggatcttgaacaacattgatggttgggttaagccaggtactttgactgctttgatgggtgtttctggtgctggtaaaactactttattggattgcttggctggtagagttaccaccggtattatttctggtgatatgttcgttaacggttcctccagagattcatctttcccaagatctattggttactgtcaacaacaggacttgcatttgagaacttctactgttagggaatccctgagattttctgcttatttgagacagccaaagtccgttccaattgcagaaaagaatgcctatgttgaagaagtcatcagaaccttggacatggaattatatgctgatgctatcgttggttctcaaggtgaaggtttgaatgtggaacagagaaaaagattgactgtcggtgttgaattggctgctaaacctaagttgttgattttcttggatgaacccacttctggtttggatagtcaaactgcttggtctatttgccagttgatgagaaaattggccgacgaaaatcaagctattttgtgcactattcatcagccaacagctatcttgatggaaaagtttgataggctgttgctgttggaaaaaggtggtaaaacagtttacttcggtgaattaggttcaggttgcagaaccatgattgactactttgaaagacatggtgctccaagatgtcctagagatgctaatccagctgaatggatgttggatatagttagatctccaaagaactccgaattgcaagaggattaccatgatatctggcgtaattccatcgattacaagttggtgcaaaaagaactggacaagttgtctaatgcttccactggttactctacaaacaccgattatgaagatgataccgaattcgctacctccttgttgtatcaaactactattgtcggtaagaggctgatggaacaatattggagatcaccacaatacctgtggtctaagtttgctttgaccatcatcaacatgctgttcatcggttttactttcttcagaacctctgctagcttgcaaggtttacaatctcaaactttggccatcttcatgttcaccgttattttcaacccactgctgcaacaatatttgccaaactatgctcaacagagggacttgtacgaagttagagaaagaccatctagaacgttttcatggaaggctttcatcatctcccaaatcttgattgaggttttctggaacttcattgctggtactgttgctttcgttatcttctactacaccatcggcttttacagaaatgcttctttggctaaccagttgtacgaaagaggtgtcttgttttggttgttatgtaccgcttacttcgtctttgttggttccatgggtattttgaccatgtccgctattgaaattttggaaaacgctgcctacattgcctcattgatgtttactatgtgtttgtccttctgcggtgttttcactactagaaaagctatgccaagattctggattttcatgtacagagtttctcccttgacctacttgttggaagctttgttgtctgttggtgtttctaacgttccaatcaagtgcaacgaaaacgagttcttgaaattggttccaccaactggtcaaacatgtggtgattatttgtctccctatttgttcgttgctcaaactggttatttgaaggatcaattggctaccgatgtttgctacttgtgtgaattgtctcacaccaacgattacttgaagagagttgacgttgattactctcaaagatggcgtaactacggtatcttcatctcttacatcgtgttcaattactgcgccggtatcttgttgtactatatctttagagtccccaagaagaatcagaccaagattaagccatctaagtaa

SEQ ID NO: 1024 - protein, 1493 aa, Kazachstania exigua
MDEDFKKFANFQMYNGVDSSTEETIKNLAKDISVNSGLKIENYTTSSSKEVESILSDLEGVDPTAKDLQDQRLNPSCDTFSSSLWVKNLAAIINNNPEYYKPYSLDCIWQNLSAYGETSGIESQANLINAPQKIINSVYRTVKPVKKEKSFTILKEMEGCINPGELLVVLGKPGSGCTTLLKSISNNTNGFKITKDTKLSYAGFTPREMKAHYGGEVIYNGEIDVHLPKLTVYQTLYTVARLKTPHNRIQGVDRDIFAKYLTDVTMATYGLSHTRDTIIGNDLIRGVSGGERKRVSIAETAICGAKLQCWDNATRGLDSAAALDFIRALRVNANTMGASSAVAIYHCSEGAYSLFDKVCILDQGYQLFFGPANDAKQYFEQMGYVCPDRQTTADFLTSVTSPEERVLNKDFLKKGIAIPQTPKEMNEYWRKSQAYSELTHEIQAKLSKNVEESRKVIKAAHLAKQSGKCRESSPYTVNYRLQIKYLLSREIWRITNYPTTNILMLLGNSAMALILGSMFYKIMKKDDTESFYFRGAAMFSATLFNAFSCLLEVFSLYESRPIIEKHKTYSLYHPSADAFASIISRVPVKIAIAICFNVVFYFLVHFKRDAGSFFFYFLINLVTVFSMSHMYRTFGSITRSLPEAMFPAAVLLLAMAMYTGFAIPRTQMLGWSTWIWYINPLAYLFESLMVNEFHGREFECSTFIPMGSMYANYTGNHRICAALGAIAGEDYVLGDDYIRNNYGYEHSHKWRGFGIGIGYSVFFLITYLIVCELNPGKTQKGEILIYPQHIIRRLRKQKESKGSTDYNSSDLEAGSSDSSITDITLLEDPKELEEESFNYTGLSTANNVFHWRNVCYDIETKNETKRILNNIDGWVKPGTLTALMGVSGAGKTTLLDCLAGRVTTGIISGDMFVNGSSRDSSFPRSIGYCQQQDLHLRTSTVRESLRFSAYLRQPKSVPIAEKNAYVEEVIRTLDMELYADAIVGSQGEGLNVEQRKRLTVGVELAAKPKLLIFLDEPTSGLDSQTAWSICQLMRKLADENQAILCTIHQPTAILMEKFDRLLLLEKGGKTVYFGELGSGCRTMIDYFERHGAPRCPRDANPAEWMLDIVRSPKNSELQEDYHDIWRNSIDYKLVQKELDKLSNASTGYSTNTDYEDDTEFATSLLYQTTIVGKRLMEQYWRSPQYLWSKFALTIINMLFIGFTFFRTSASLQGLQSQTLAIFMFTVIFNPLLQQYLPNYAQQRDLYEVRERPSRTFSWKAFIISQILIEVFWNFIAGTVAFVIFYYTIGFYRNASLANQLYERGVLFWLLCTAYFVFVGSMGILTMSAIEILENAAYIASLMFTMCLSFCGVFTTRKAMPRFWIFMYRVSPLTYLLEALLSVGVSNVPIKCNENEFLKLVPPTGQTCGDYLSPYLFVAQTGYLKDQLATDVCYLCELSHTNDYLKRVDVDYSQRWRNYGIFISYIVFNYCAGILLYYIFRVPKKNQTKIKPSK

SEQ ID NO: 1025 - DNA, 4482 bp, Kazachstania africana CBS 2517
  source 1..4482: mol_type = other DNA
atgtccgagaagaaggacatcattgattctggtgctatgtcccaagttgacgaatcttcttctttgaacttgcaatcctacgatggtttcgatcaaaacgcccaagataagattagacaattggccagatctttgaccaaccagtcatctactactcataacaatgatgctgccagcttgttctctaatgttaagggtgttaatcccgttttcaccgatccatctaatccagaatatgacgaaagattggatccagagtctgagaacttttcttctactgcttgggttaagaacatggctaatttgactgctgctgatccagattactacaagccatattctttgggttgtgtttggaaagatttgaccgcttctggtgattcttctgatgttgtttatcagtccaccgttttcaacatgccaacgaagttattgaaaaccgctttcagaaaagctaggccagctaaagaatctgataccttccaaattctgaagccaatggaaggttgtattaacccaggtgaattattggttgttttgggtagaccaggttctggttgtactactttgttgaagtccatttcctctaacacccatggttttaacgttggtaaggattccaccatttcttacaatggtttgactccaaaggccatcaacagacattatagaggtgaagttgtttacaacgccgaatccgatgttcatttgccacatttgactgttttcgaaaccttgtacactgtcgccagattgaaaacaccatctaatagagttcaaggtgttgacagagatacttacgctaaacatttgaccgatgttactatggctacttacggtttgtctcataccagaaataccaaggttggtaacgatttggttagaggtgtttctggtggtgaaagaaagagagtttctattgccgaagttaccatttgcggttctaagtttcaatgttgggataacgctactagaggtttggattctgctacagctttggaattcattagagccttgaaaactcaagctaccttgactaatactgctgctactattgctatctaccaatgctctcaagatgcctacgatttgttcgataaggtttgtgtcttgtacggtggttaccaaattttctatggttctgctcaaaaggctaaaaagtacttcgaaactatgggttaccagtgtccagaaagacaaactactgctgatttcttgacttctgttacttctccagctgaaagagttatcaacccagattttattggtaggggtatccaagttccacaaactccagaagatatgaacaactattggagaaactccccagagtacaaagaattgatcaacgaaatcgatacccacttggccaacaatcaagatgaatccagaaactccatcaaagaagctcatattgccaagcaatctaacagagctagacctggttctccatacactgttaattatggtatgcaggtcaagtacctgttgactagaaatgtttggaggatcaagaacaactcctctgtccagttgtttatgattttcggtaattgcggtatggccttcattttgggttctatgttttacaaggttatgaagcacgattccacctctactttttactacagaggtgctgctatgttcttcgccattttgtttaatgctttctcgtgcttgttggagatcttctcattatatgaagccagaccaatcaccgaaaagcacagatcttattccttgtatcatccatctgctgatgctttcgcttccattttctctgaaattcctaccaagatcattatcgccatcggtttcaacattatctactatttcttggtcaacttcgagagaaatggcggtgttttctttttctactggctgattaacatcgttgctgttttcgctatgtctcacttgtttagaactgttggttctctgactaagaccttgtctgaagctatgattccagcatctatgttgttgttggctatgtctatgtttaccggtttcgctattccaaagaccaaaatgttaggttggtctaagtggatctggtacattaacccaattgcctacttgttcgagtccttgatgattaacgaattccacggtagaagatttgaatgcgctgcttttattccatctggtccagcttactctaacattactgctacagaaagagtttgcgctgtttcaggttctgttgctggtcaatcttatgttttaggtgacgattacatccgtgtctcttatgactacttgcacaaacataagtggcgtggttttggtattggtatggcatacgctatctttttcttgttcgcttacttagttgtctgcgagtataatgaaggtgctaagcaaaaaggtgagatgttggtttttccacaatccgtcttgagaaagttgagaaaagaaggtcagctgaagaaggattccgaagatatagaaaacggctctaactcttctaccactgaaaaacagttgttggaagattccgatgagggttcttctaatggtgattcaactggtttggttaagtccgaagctatttttcattggaggaacttgtgttacgacgtccaaatcaaagacgaaactagaaggatcttgaacaacgttgatggttgggtaaaaccaggtactttaactgctttgatgggttcttcaggtgctggtaaaactactttattggactgtttggctgaaagggttacaatgggtgtaattactggtgatgttttggttgatggtagaccaagagatgaatctttcccaagatctattggttactgtcaacaacaagacctgcacttgaaaacctctactgttagagaatccttgagattctctgcttacttgagacaaccagctgaagtttctgttgaagaaaaggatgcttacgtcgaagaagtcattaagatcttggagatggaaaagtacgctgatgctgttgttggtgttgccggtgaaggtttaaatgttgaacaaagaaagcgtttgaccatcggtgttgaattggctgctaaacctaagttgttggtctttttggatgaacctacttctggtttggatagtcaaactgcttggtctatttgccagctgatgagaaaattggcttctcatggtcaagctatcttgtgcactattcatcaaccatccgctattttgatgcaagaattcgataggttgctgttcttgcagaaaggtggtaagactgtttacttcggtgaattaggtgaaggctgccaagttatgattgactactttgaaagaaacggctcccataagtgtccaccagatgctaatcctgctgaatggatgttggaagttgtcggtgctgctccaggttctcatgctaatcaagattatcatgaagtctggcgtaactccgaagaattcagaatagttcacgaagagttggacttgatggaaagagaattaccagctaaatctgctggtgttgataccgatcatcaagaatttgctactggtttgttctatcagaccaagttggtttccgttaggttgttccaacagtattggagatcacctgaatacttgtgggctaagtttgtgttgactatcttcaacgagctgttcatcggttttactttctttaaggctggtacttcattgcagggcttgcaaaatcaaatgttggctgctttcatgttcaccgtcatttttaacccactgttgcagcaatacttgccatcttttgtccaacaaagagacttgtacgaagctagagaaagaccatctagaacattttcttggaaggctttcatcgtgtcccaaatattggttgaagctccatggaatttcttggcaggtacattggcttacttcatctattactacccaatcggtttctacgaaaacgcttcttacgcaggtcaattgcacgaaagaggtgctttgttctggttattttctaccgctttctacgtttacgttggttctatgggtttcttgaccgtttcctttaacgaaattgctgaaaacgctgctaacttggcctctttgatgtttacaatggccttgtctttttgcggtgttatgacaactccatctgcaatgccaagattttggatcttcatgtacagagtctctccattgacatacttcgttcaaggtattttggctgttggtttggctaacaccaagatcgaatgttcttcatctgagttcttgcaatttgaagcaccatcaggtatgacttgtggtaattacatggaagcctatttggattatgctggtactggttacttgaaggatgaatcagctactggtacttgtgaattctgcgaatactcttacaccaacgactacttgtcctccattaactcttattactctcagagatggcgtaattggggtattttcatttgttacattgccatcaactacatcggtggtattgctttctattacttggctagagttcccaagaaatctaaggttgctaagaagtaa

SEQ ID NO: 1026 - protein, 1493 aa, Kazachstania africana CBS 2517
MSEKKDIIDSGAMSQVDESSSLNLQSYDGFDQNAQDKIRQLARSLTNQSSTTHNNDAASLFSNVKGVNPVFTDPSNPEYDERLDPESENFSSTAWVKNMANLTAADPDYYKPYSLGCVWKDLTASGDSSDVVYQSTVFNMPTKLLKTAFRKARPAKESDTFQILKPMEGCINPGELLVVLGRPGSGCTTLLKSISSNTHGFNVGKDSTISYNGLTPKAINRHYRGEVVYNAESDVHLPHLTVFETLYTVARLKTPSNRVQGVDRDTYAKHLTDVTMATYGLSHTRNTKVGNDLVRGVSGGERKRVSIAEVTICGSKFQCWDNATRGLDSATALEFIRALKTQATLTNTAATIAIYQCSQDAYDLFDKVCVLYGGYQIFYGSAQKAKKYFETMGYQCPERQTTADFLTSVTSPAERVINPDFIGRGIQVPQTPEDMNNYWRNSPEYKELINEIDTHLANNQDESRNSIKEAHIAKQSNRARPGSPYTVNYGMQVKYLLTRNVWRIKNNSSVQLFMIFGNCGMAFILGSMFYKVMKHDSTSTFYYRGAAMFFAILFNAFSCLLEIFSLYEARPITEKHRSYSLYHPSADAFASIFSEIPTKIIIAIGFNIIYYFLVNFERNGGVFFFYWLINIVAVFAMSHLFRTVGSLTKTLSEAMIPASMLLLAMSMFTGFAIPKTKMLGWSKWIWYINPIAYLFESLMINEFHGRRFECAAFIPSGPAYSNITATERVCAVSGSVAGQSYVLGDDYIRVSYDYLHKHKWRGFGIGMAYAIFFLFAYLVVCEYNEGAKQKGEMLVFPQSVLRKLRKEGQLKKDSEDIENGSNSSTTEKQLLEDSDEGSSNGDSTGLVKSEAIFHWRNLCYDVQIKDETRRILNNVDGWVKPGTLTALMGSSGAGKTTLLDCLAERVTMGVITGDVLVDGRPRDESFPRSIGYCQQQDLHLKTSTVRESLRFSAYLRQPAEVSVEEKDAYVEEVIKILEMEKYADAVVGVAGEGLNVEQRKRLTIGVELAAKPKLLVFLDEPTSGLDSQTAWSICQLMRKLASHGQAILCTIHQPSAILMQEFDRLLFLQKGGKTVYFGELGEGCQVMIDYFERNGSHKCPPDANPAEWMLEVVGAAPGSHANQDYHEVWRNSEEFRIVHEELDLMERELPAKSAGVDTDHQEFATGLFYQTKLVSVRLFQQYWRSPEYLWAKFVLTIFNELFIGFTFFKAGTSLQGLQNQMLAAFMFTVIFNPLLQQYLPSFVQQRDLYEARERPSRTFSWKAFIVSQILVEAPWNFLAGTLAYFIYYYPIGFYENASYAGQLHERGALFWLFSTAFYVYVGSMGFLTVSFNEIAENAANLASLMFTMALSFCGVMTTPSAMPRFWIFMYRVSPLTYFVQGILAVGLANTKIECSSSEFLQFEAPSGMTCGNYMEAYLDYAGTGYLKDESATGTCEFCEYSYTNDYLSSINSYYSQRWRNWGIFICYIAINYIGGIAFYYLARVPKKSKVAKK

SEQ ID NO: 1027 - DNA, 4575 bp, Kluyveromyces dobzhanskii
  source 1..4575: mol_type = other DNA
atggacaacgaatccaccgattccttggttgaatatcaaggtttcgataacaaggtcgagaaccagattagagatttggctagaactttgtccagagcctctttgaaagaacaaggttctaaccacgatttggtttctggtgctgctgatgatgataccagatctattttctctaccaagtacgaaggtgtcaacccagttttctctgatgctaatgctccaggttatgatgctagattggatcctaattccgacaacttttcttctgctgcttggatcagaaatatggttgctttggctggttgtgacccagaatattacaaacattacaccatttcttgctgctggaaggatttgagagcttttggtgatccaactgatgttgcttaccaatctactatggttaacatgccccaaaagatcttctcacaagtcaagagatctttgtgcaagccaaaggatgaacaagttttcgatatcttgaagccaatggacggtttgttgaaagctggtgaattattggttgttttgggtagaccaggttctggttgttctaccttgttgaaaactatttccgctaacgttcaaggttaccacttggacgaaaaatccatcgtttcttacaatggtttggatgctaagactatcggtaaacactatagaggtgaagttgtttacaacgccgaatccgatgttcattttccacatttgtctgtctttgaaaccctgtacaacattgctttgttggttactccatccaacagagttaagggtgtttctagagaagatttcgctaagcacgttactgaagttgctatggctacttatggtttgtctcataccaaagataccaaggtcggtaacgaattggttagaggtgtttcaggtggtgaaagaaagagagtttctattgccgaagttaccatttgcggttctagatttcaatgttgggataacgctactagaggtttggattctgctactgctttggaattcattagagccttgaaaacctctaccgctatttctggttctactggtgttattgctatctaccaatgttcccaagatgcctacgatttgttcgataaggtttgtgttttacacgagggctatcaaatctattacggttctgctaaagaagccaagggttacttcgaaagaatgggttatgaatccccatctagacaaactactgctgatttcttaaccgctgttactaatccagctgaaagaatcccaaatgaagcctttgtcaaagaaggtcgttacattccatctaccgcaaaagaaatggaagaatactggcgtaattctccagaatatgctgctttgagacaagaaattgaagccgaattgtctaaggattctaccgaagctagacaagaattgctagatgctcatgttgctagacaatccaagagacaaagaaagtcctctccttacatcgttaacttcggtatgcaagttaagtacttgacgatgagaaacttcctgaggatcaaaaagtcttacggtattaccgttggtactattgctggtaatactgctatggcattggttttgggttccatcttttacaagtctatgcaagataccactaccgccacatttttctacagaggtgctgctatgtttatcgccgttttgtttaatgctttcgcctccatgttggagatcttcagcttgtatgaagccagaccaattatcgaaaagcacagaagatacagcttgtaccatccatctgctgatgctttagcttctatgttgtctgaattgccatctaagattgtcaccgccatttgtttcaacctgatcttgtatttcatggtcaacttcagaagagaaccaggtccattcttcttctactttctgatgaatttcttggccaccttggttatgtctgctatttttagatgtgttggttccgctactaagaccttgtctgaagctatggttccagcttcttgtttgttgttggctatctcattatacgtcggtttctccattccaaagaaggacttgttaggttggtcaagatggatttggtacatcaacccattgtcctacatcttcgaatccttgatgatcaatgaattcgtcggtagagatttcccatgtgctacttttgttccatcaggtgctggttatgaagatatcggttctttagaaagagtctgcaatactgttggtgctgttccaggtaatcctagagtttctggtttggctttcattgaacaaacctatggttactctgcttctcatagatggcgttctttaggtattggtattgccttcttcattttcttcaccgccttttacttgttgttctgcgaattcaatgaatccgccgttcaaaagggtgagattttgttgtttccaaagtccgtcttgaagtccaaaagaaggcagttgtctaagtccaagaacgatattgaaacagccgatgatcctgaaggtggtgttactgatcaaaagttgttgcaagactccttggaagagtctaatgtctcttcatcttctgaaaagtctgctaacgctaatgtcggtttgtctaaatccgaagctattttccattggagaaacgtttgttacgacgtccagattaagaaagaaacccgtagaatcttgtccaacgttgatggttgggttgaaccaggtactttgactgctttgatgggttcttctggtgcaggtaaaactactttgttggattgcttggcatctagagttaccatgggtgttattactggtgatatgttcgttaacggtcacttgagagataacagctttccaagatctattggttactgtcaacaacaggacttgcatttggctactgctactgttagagaatctttgagattctccgcttacttgagacaatcctctgaagtttcaatcgaagagaagaactcctacgttgaagatgtcttgaggattttggaaatggaaccttacgctgatgctgttgttggtatagccggtgaaggtttgaatgtcgaacaaagaaaaagattgaccatcggtgttgaattggctgctaaacctaagttgttgttgtttttggatgaacccacctccggtttagattctcaaactgcttggtctatttgccagttgatgagaaaattggctgatcacggtcaagccattttgtgtactattcatcaaccatccgctctgttgatgcaagaatttgatagactgctgttcttgcagaaaggtggtaaaaccatatacttcggtgacttaggtccaggttgtgaaactatgatcgactactttgaatctcatggtgctgataagtgtccagaaggtgctaatcctgcagaatggatgttggaagttattggtgctgcaccaggttcacatgctaatcaagattatcatgaagtctggcgtaactccgaagagtataatgctgttcaacaaaagttggactggatggaagttgagttggctaaaaagccattggacaactcttcagaacaatctgaattcggcacttccattttctaccagtgtaagatagttaccttgaggttgttccaacagtactacagaactccatcttacatttggtccaagttgttcttgaccatcttctcccaattattcatcggcttcacctttttcaaagccaagttggacatgcaaggtctgcaaaatcaactgtttgctgttttcactttcaccgtgatttttaacccagcttgccaacaatacttgcccttgttcgtttctcaaagagacttgtacgaagcaagagaaagaccatctagaacattttcttggttggccttcatctactcccaaatcgttgttgaaattccattcaacgttgtcttgggtactataggctttttcgttttctattacccaatcggcttttacaacaacgcctcttattctgaccaattgaacgaaagaggtgtcctgttttggttattctctgttgctttctacgtgttcatctcctctatgggtcaattgtgtattgcaggtttggaatacgctgaagctgcaggtaatttggcatctttgtgtttcactatgtccttgaatttctgcggtgtttttggtggtccaggtgttttgccaggtttttgggtttttatgtacagagtctctcccctgtcttacttcattgatggtgttttgtctacagccttggctaacaatccagttacttgtgctgattacgagtacttgtcctttgttcctaaatctggtgaaacttgtggtgagtacatgtctacttacattgctacttacggtggttacatcttagatccagatgctacagatgaatgctccttctgtagaatttcttctaccaacgctttcctgtcctctttccaatcttcttatcatagacgttggaggaacttcggaatcttcatcgtttttatcgttttcaattgggccggttgcatcttcttttactggttggctagagttcctaagaagaacaatagagttgccaacgaaagaaatccagatagagaaaccaccaagcaaatttctactcatggtgaaaagtccaagccacaacaaattgaacaagtctaa

SEQ ID NO: 1028 - protein, 1524 aa, Kluyveromyces dobzhanskii
MDNESTDSLVEYQGFDNKVENQIRDLARTLSRASLKEQGSNHDLVSGAADDDTRSIFSTKYEGVNPVFSDANAPGYDARLDPNSDNFSSAAWIRNMVALAGCDPEYYKHYTISCCWKDLRAFGDPTDVAYQSTMVNMPQKIFSQVKRSLCKPKDEQVFDILKPMDGLLKAGELLVVLGRPGSGCSTLLKTISANVQGYHLDEKSIVSYNGLDAKTIGKHYRGEVVYNAESDVHFPHLSVFETLYNIALLVTPSNRVKGVSREDFAKHVTEVAMATYGLSHTKDTKVGNELVRGVSGGERKRVSIAEVTICGSRFQCWDNATRGLDSATALEFIRALKTSTAISGSTGVIAIYQCSQDAYDLFDKVCVLHEGYQIYYGSAKEAKGYFERMGYESPSRQTTADFLTAVTNPAERIPNEAFVKEGRYIPSTAKEMEEYWRNSPEYAALRQEIEAELSKDSTEARQELLDAHVARQSKRQRKSSPYIVNFGMQVKYLTMRNFLRIKKSYGITVGTIAGNTAMALVLGSIFYKSMQDTTTATFFYRGAAMFIAVLFNAFASMLEIFSLYEARPIIEKHRRYSLYHPSADALASMLSELPSKIVTAICFNLILYFMVNFRREPGPFFFYFLMNFLATLVMSAIFRCVGSATKTLSEAMVPASCLLLAISLYVGFSIPKKDLLGWSRWIWYINPLSYIFESLMINEFVGRDFPCATFVPSGAGYEDIGSLERVCNTVGAVPGNPRVSGLAFIEQTYGYSASHRWRSLGIGIAFFIFFTAFYLLFCEFNESAVQKGEILLFPKSVLKSKRRQLSKSKNDIETADDPEGGVTDQKLLQDSLEESNVSSSSEKSANANVGLSKSEAIFHWRNVCYDVQIKKETRRILSNVDGWVEPGTLTALMGSSGAGKTTLLDCLASRVTMGVITGDMFVNGHLRDNSFPRSIGYCQQQDLHLATATVRESLRFSAYLRQSSEVSIEEKNSYVEDVLRILEMEPYADAVVGIAGEGLNVEQRKRLTIGVELAAKPKLLLFLDEPTSGLDSQTAWSICQLMRKLADHGQAILCTIHQPSALLMQEFDRLLFLQKGGKTIYFGDLGPGCETMIDYFESHGADKCPEGANPAEWMLEVIGAAPGSHANQDYHEVWRNSEEYNAVQQKLDWMEVELAKKPLDNSSEQSEFGTSIFYQCKIVTLRLFQQYYRTPSYIWSKLFLTIFSQLFIGFTFFKAKLDMQGLQNQLFAVFTFTVIFNPACQQYLPLFVSQRDLYEARERPSRTFSWLAFIYSQIVVEIPFNVVLGTIGFFVFYYPIGFYNNASYSDQLNERGVLFWLFSVAFYVFISSMGQLCIAGLEYAEAAGNLASLCFTMSLNFCGVFGGPGVLPGFWVFMYRVSPLSYFIDGVLSTALANNPVTCADYEYLSFVPKSGETCGEYMSTYIATYGGYILDPDATDECSFCRISSTNAFLSSFQSSYHRRWRNFGIFIVFIVFNWAGCIFFYWLARVPKKNNRVANERNPDRETTKQISTHGEKSKPQQIEQV

SEQ ID NO: 1029 - DNA, 4461 bp, Lachancea mirantina
  source 1..4461: mol_type = other DNA
atgtcccaagaacactccgaccaatcattatatgatggcccaaacaagaaagagatcagagatttggctagaactttgactgctgcttctgttgctgtttctggtaattctgatgctgctgttaatccattggctgctcaaccaggtgaaccaggttataatgctagattggatcctaactccgacgaattttcttcagaagcttgggttagaaacttgtctcatttgacagctgaaaacccagattactacaagccattttctttgggttgtgcttggaagaatttgagagcttatggtgattctaccgatgttgcttaccaatctactgttgctaatttgccatggaagttgttgcaattcggttacagatgtgtcagaaagtctagaccatctgataagttcgacatcttgaagtccatggatggtattttgaacccaggtgaattattggttgttttgggtagaccaggttctggttgttctactttgttgaagtctatctcctctaacacccatggttttaaagttgctccagaatccgaaatcagatacgatggtttgaccccaaaagaaattgctaaacactacagaggtcaagttgtttacaacgccgaatctgatgttcatttcccacatttgtctgttttcgacaccttaaagaccattgctttgttgtctactccagccaatagaatcgaaggtatggatagagaaacctacgctaaacatgttaccgaagtttacatggctacttacggtttgtctcataccagaaataccaaggttggtaacgatttggttagaggtgtttcaggtggtgaaagaaagagggtttctattgctgaagttgctatttgcggttctaagttgcaatgttgggataatgctactagaggtttggattctgctactgctttggaattcattaaggccttgagagttaatgcccaaatgactaatacctccggtgttattgctatctaccaatgttctcaagatgccttcgatttgttcgataaggtttgtgttttacacgagggttatcagatctattatggtccagcatctgaagccaagcaatactttgaagatatgggttacgtttccccagaaagacaaactactgctgatttcttaaccgctgttactaatccagccgaaaggattatgaatcaagagttcatcaagcagaacaagttcattccaagaaccgctgaagagatggaaaaacattggagaaactcctccaactacaagagattgattggtcaaatcgatgaatgcttcgctagagattctgataaggctaagcaagaattgcaagatgctcatactgctaagcagtctaaaagatcaagaccatcttctccatacaccgtttcttatggtatgcaggttaagtacctgctgagaagaaacatccaaagaattagaagtgatgccggtgttaccatcttccaagttgttggtaatgctgctatggctttcattttgggttctatgttctacaaaatcctgaagcacgatgataccgctggtttttattctagatctggtgctttgttcttcgccgttttgtttaatgctttctcctgcttgttggaaatcttcgcattatacgaagccagaccaatttctgaaaagcacaagagatacagcttgtaccatccttctgctgatgctttagcttccgttattagtgaaattccagctaagatcgttaccgccatttgttttaacattgccctgtactttttgtgcaacttgagacaatctgctggtgcctttttcttttacttcctgatgaatatggttgccacctttgctatgtcccatattttcagatgtttgggtgctgctactaagactttttctgaagctatggttccctcctctttgttgttgttatctatggctatctacaccggtttcgctattccaaagacaaaaatgttaggttggtccaagtggatctcctacattgatccattgtcctacatcttcgaatccttgatggttaacgaattccacggtagaaagttccaatgctctgtttatgttccaactggtccagcttatgctaatgctacaggtactgaaagagtttgttcagctgttggtgctgttccaggtcaagattatgttttaggtgatgactacctgaggctgtcttacaattacttgcacaaacataagtggcgtggtttcggtattggtatggcttatgttgttttcttcttgggtgtttacttggccttcactgaattcaacgaatctgctagacaaagaggtgaagttttggttttcaccagggaatctttgaagaagatgaagagagctaagaagttggaatcagctagaggtgatgctgaaaattctgctggtatggaaactggtatcaacgagaagaagttgcttgaagaatctggtgaatcttccacctcatctttccaagatgttaagttgtctcaaaccgaggctatttttcattggaggaacgtttgtttcgacgtgaagattaagaaagaagataggcgtatcttgaacaacgttgatggttgggttaagccaggtactttaactgctttgatgggttcttctggtgctggtaaaactactttattggactgtttggcttctagagttactactggtgttgttactggtgatatgttcgttaacggtcatttgagagatgcttcattcgctagatctattggttactgtcaacaacaagacttgcacttgcaaactgctactgttagagaatcattgagattcgctgcttatctaagacaaccagcttctgtttctaccgaagaaaagaacgattacgtcgaagaaatcatcaggatcttggacatggaaaagtacgctgatgccgttgttggtgttgctggtgaaggtttgaatgttgaacagagaaaaagattgaccatcggtgttgaattgtctgctaaacctaagctgctgttgtttttggatgaacctacttctggtttggactctcaaactgcttgggctatttgtcaattgatgagaaagttggctaaccatggtcaagctattttgtgcactattcatcaaccatccgctttgttgatgcaagaattcgatagactgctgttcttgaaaagaggtggtagaactgtttacttcggtgatctaggtgatggttgctctaagatgattgactactttgaatctcaaggtgctccaaaatgtccaccaggtgctaatcctgctgaatggatgttggaagttattggtgctgctcctggttctcatacagataaggattacggcgaagtttggagaaattcagatgagtatagagccgttcaagaggaattggattggatggaaagagaattgccaaaaagacctttggatactgctgcagaacaaactgaatttgccacttctttgttcacccagtacaagttggttactcaaaggttgttccaacagtattggagaacaccatcttacttgtggtccaagattatcctgaccttgatttcccaaatcttcatcggtttcacgttcttcaagtccgattctacattgcaaggtctgcaaaatcagatgttgtccattttcatgttcaccgtcgttttcaatccaaccttgcaacaatacttgccatcctttgtttctcagagagacttgtacgaagctagagaaagaccatccagaacattttcttggaaggctttcatcttgtcccaaattactgttgaagccccatggaattttgctgttggtactttgggtttcctgatctattactacccagtgtctttttacagaaacgcttcttacgcacatcagttgcacgaaagaggtgctttattttggttattctgtaccgccttctacgtttacgttggttctatgggtcaattgtgcattgctggtattgaagttgcagaatctgcaggtcatattgcctcattgatgtttaccttgtccttgtctttttgcggtgttatggttactccacaaaacatgccaggtttttggaagtttatgtacagagcttctccactgacctacttcatagatggtttaatgtctactggtttggctaatgctccagctcattgctctcattatgaattggttagttttactccaccagccggtcaaacttgtggtgagtatatggctccatatatcaaaatggctggtactggttatttgacctctccatcagctactgataagtgttctttttgtccagtctctactaccaacgattacttggctcaagtttcctcacattacaaagatagatggcgtaactggggtattttcatctgctacattttcatcgactttggcttcgcaatcttcttttattggcttgcaagagtcccaaagaagaaaaacagagttgctgatgaacgtgatccagatgctccaaagaaatctgttgcaggtactaagaactaa

SEQ ID NO: 1030 - protein, 1486 aa, Lachancea mirantina
MSQEHSDQSLYDGPNKKEIRDLARTLTAASVAVSGNSDAAVNPLAAQPGEPGYNARLDPNSDEFSSEAWVRNLSHLTAENPDYYKPFSLGCAWKNLRAYGDSTDVAYQSTVANLPWKLLQFGYRCVRKSRPSDKFDILKSMDGILNPGELLVVLGRPGSGCSTLLKSISSNTHGFKVAPESEIRYDGLTPKEIAKHYRGQVVYNAESDVHFPHLSVFDTLKTIALLSTPANRIEGMDRETYAKHVTEVYMATYGLSHTRNTKVGNDLVRGVSGGERKRVSIAEVAICGSKLQCWDNATRGLDSATALEFIKALRVNAQMTNTSGVIAIYQCSQDAFDLFDKVCVLHEGYQIYYGPASEAKQYFEDMGYVSPERQTTADFLTAVTNPAERIMNQEFIKQNKFIPRTAEEMEKHWRNSSNYKRLIGQIDECFARDSDKAKQELQDAHTAKQSKRSRPSSPYTVSYGMQVKYLLRRNIQRIRSDAGVTIFQVVGNAAMAFILGSMFYKILKHDDTAGFYSRSGALFFAVLFNAFSCLLEIFALYEARPISEKHKRYSLYHPSADALASVISEIPAKIVTAICFNIALYFLCNLRQSAGAFFFYFLMNMVATFAMSHIFRCLGAATKTFSEAMVPSSLLLLSMAIYTGFAIPKTKMLGWSKWISYIDPLSYIFESLMVNEFHGRKFQCSVYVPTGPAYANATGTERVCSAVGAVPGQDYVLGDDYLRLSYNYLHKHKWRGFGIGMAYVVFFLGVYLAFTEFNESARQRGEVLVFTRESLKKMKRAKKLESARGDAENSAGMETGINEKKLLEESGESSTSSFQDVKLSQTEAIFHWRNVCFDVKIKKEDRRILNNVDGWVKPGTLTALMGSSGAGKTTLLDCLASRVTTGVVTGDMFVNGHLRDASFARSIGYCQQQDLHLQTATVRESLRFAAYLRQPASVSTEEKNDYVEEIIRILDMEKYADAVVGVAGEGLNVEQRKRLTIGVELSAKPKLLLFLDEPTSGLDSQTAWAICQLMRKLANHGQAILCTIHQPSALLMQEFDRLLFLKRGGRTVYFGDLGDGCSKMIDYFESQGAPKCPPGANPAEWMLEVIGAAPGSHTDKDYGEVWRNSDEYRAVQEELDWMERELPKRPLDTAAEQTEFATSLFTQYKLVTQRLFQQYWRTPSYLWSKIILTLISQIFIGFTFFKSDSTLQGLQNQMLSIFMFTVVFNPTLQQYLPSFVSQRDLYEARERPSRTFSWKAFILSQITVEAPWNFAVGTLGFLIYYYPVSFYRNASYAHQLHERGALFWLFCTAFYVYVGSMGQLCIAGIEVAESAGHIASLMFTLSLSFCGVMVTPQNMPGFWKFMYRASPLTYFIDGLMSTGLANAPAHCSHYELVSFTPPAGQTCGEYMAPYIKMAGTGYLTSPSATDKCSFCPVSTTNDYLAQVSSHYKDRWRNWGIFICYIFIDFGFAIFFYWLARVPKKKNRVADERDPDAPKKSVAGTKN

SEQ ID NO: 1031 - DNA, 4251 bp, Clavispora lusitaniae
  source 1..4251: mol_type = other DNA
atgtccgaacacagattgcagagaagattattgactccattcctgtctaaaaaggtccctccaattcctgaagaagatgagagaatcgtttacccaaaaaggccaaacatcttctccatcatgtttttctggtggttgggtccagttatgagagctggttacaaaagaactttgactgctcaggacctgtacaagttgaacgatgatattaaggtcgagtccatgaccagaagattcgaacaatacttccagaactctttgaacaaagctatggctgctcatgttagagctaaaatgaaggctagaggtgaaactgctgaaactaacactgttgatttcgagaaggacatggaagatttcgaagttcccaagatgattatcgttagagccattgctagaaccttcacttttcaatatggtatggcttgcttgatgatggctttgggttctactggtaattctactactcctttgttgaccaagaagttgatcagattcgttgaattgagaaccttgggtctagaaaagcacatgaatgctggtattggttacgctattggttcctccattatggttttggttaacggtttgttcgttaaccatgccttccatttgtctatgttgactggtgctcaagttaaggctgctttgacaaaagctttgttggacaagtctttcagattgtccgatgcctctaaacatgaattcccaacttctaagatcacctctatgatgggtgctgatttggctagaattgattttgccttgggtttccaaccattcttgattacttttccagttccaatcgccatctccattggtattttgtgtcataatattggtgctccagctatggttggtgttggtttgattattgtgttcatggtcttgaccatgttcgtcactggtaagttgtttgcttacagaaagactgctaacgttttcaccgatgctagagttaactacgtcaaagaagtcctgaacaacttgaaggtcatcaagttttactcttgggagatcccatactccaagattattaccgagaaccgtaacaaagagatgaacatcgtttacatcatgcaagtcgccagaaacattattacctcattgggtatgtctctgaccctgttttcttctttggttgcatttttggtcttgtacgccattcaaggttctacaaaagatccagcctctatcttctcctcgatttctttgttttctgccttggcttctcaggttttcatgattccattggctttggcttcaggttctgatgctttgattggtgttactaggattggtgaatttttggctgctgaagaagttaacccaagatccgctagaattactgcttctgaaaagactaaggctgatatggaagctaacaagttggccttgtctattaagaacgcttctttcaagtgggaaacctttggtgaacaaggttcccatacaaacaacactcataccttgtccgaaaaagaaaacttcaccgcttcagagaaagagctgtacaacaaattggaaaaacacatgaccaacaagtccatctccaccatttctcatgaatctgcttcatctccagatcatggtcctttttctgattcttcttcattggccgaacaaaatttcccaggtttggaatccattgatttggatgttaagaagggtgaattcgttgttatcactggtttgatcggttctggtaaaacctctttgttgaatgctatggccggtttcatgaagagagtttctggttctgttgatgtcaacggttctttgttgttgtgtgatcaaccatggattcaaaacgctaccgttagagaaaacatcttgtttggtttgccaatggatgatgccaagtacaagaatgttgtttacgcttgctctttggaatctgacttggaaattttacctgctggtgatttgaccgaaattggtgaaagaggtattactttgtctggtggtcaaaaggctagaatcaatttggcaagagctgtttatgccgatatggacattatcttgttggatgatgttttgtccgctgttgatgcaagagttggtaaacatattatggcccaatgcatcatgggtatcttgaaggataagaccagaattttggctacccaccaattgtcattgattggttctgctgataggatcgttttcttgaatggtaacggttccatttccgttggtactttcgaagaattgaagtccaagaacgaagccttctctcatttgatggcctttaatgctgattcccatgattctgaggatgagaaagaagaagaagtcgaggacgaggaagaaagagaagctgtaaaagaattggttgaaaggcaagtcaccagatacaaatctagagctgacgaagaagaaattaggcacgattatgaagctaacgctgataaggatggtagattgatcgatgatgaagaaaaggctgaaaacggtatcaagttcgaagtctacaagaactacttgtccattggttccggtattttcaagcactattcatccgttcctatcgtcatcgttttgattgctttgtctgttttctgtcagctgttcactaatacctggttgtctttctggtccgaaaagaagtttgctcataagtctaacggtttctacatcggcttttacgttatgttcacattcttggctgctattttcttgaccttggaattcgttttgttggcctacttgactaacaacgcttctactaagttgaacttgatggctgttcaaaaggttttgagagccccaatgtcttacatggatgttactccaatgggtagaatcttgaacagattcactaaggataccgataccttggataacgaaatcggtaaccagattagaatgctgacctacttcttctctaacatcgttggtgttttggttttgtgcgttatctacttgccatggtttgctattgctattccattcttgggttttatcttcgttgccatcggtaatttctatcaagcttctgctagagagatcaagagattggaagcagttcaaagatccttcgtctacaacaacttcaacgaaacattgtctggtatgaagaccattaaggcttaccaagctgaagaaaggttcttggaaaagaacgatacctacgtcaacaacatgaacgaagcttactacatcaccattgctaatcagagatggttgtccatccatttggattttgttgctgctggtttcgccttgattatttgctttttgtgtgtgttcagggttttcaagatttccgctgcttcagttggtctgttgttgtcttacgttttacaaattgccggtcagttgtccatgttggttagaacttatacccaagtcgaaaacgagatgaactccgttgaaagaatttgtgaatacgccttgtatttgccagaagaagctccatacaacatctcagaaacaaaaccagctgattcttggccagaacatggtgctgttagattcgaaaatgtttccttggcttatagaccaggtttgccattggttttgaaaaacttgtctgccgacattaagcccaaagaaaagattggtatatgtggtagaactggtgccggtaaatcttctattatgactgccttgtaccgtctgtctgaattgaatggtggtaagattgaaatcgatggtgtcgacatttctaagttgggtttgaacgatttgaggtccaagttgtctatcattccacaagatccagttttgttcaggggtactattagaaagaacttggatcccttcaacttgagttctgaagatgtattgtggtctgctttgcgtagagcaggtttgattgaagaatccaagttggaatttgtcaagacccaaaaaccagatgctgaaaacttgcataagttccacttggatagagaagtcgaagatgaaggttccaacttttcattgggtgaaagacagttgatttccttcgctagagcaatggttagagactctaagatcttgattttggatgaagccacttcctccgttgattacgaaactgattctaagattcagtccaccatcgtcagagaatttggtaactgtaccattttgtgcattgcccacagattgagaactatcttgaactacgataggatcttggtattggataggggtgagatcaaagaattcgatactccatggaacttgttccagtcagaagatggtatctttaagcagatgtgcgaaagatccaacatcaccaaggatgattttaagcactga

SEQ ID NO: 1032 - protein, 1416 aa, Clavispora lusitaniae
MSEHRLQRRLLTPFLSKKVPPIPEEDERIVYPKRPNIFSIMFFWWLGPVMRAGYKRTLTAQDLYKLNDDIKVESMTRRFEQYFQNSLNKAMAAHVRAKMKARGETAETNTVDFEKDMEDFEVPKMIIVRAIARTFTFQYGMACLMMALGSTGNSTTPLLTKKLIRFVELRTLGLEKHMNAGIGYAIGSSIMVLVNGLFVNHAFHLSMLTGAQVKAALTKALLDKSFRLSDASKHEFPTSKITSMMGADLARIDFALGFQPFLITFPVPIAISIGILCHNIGAPAMVGVGLIIVFMVLTMFVTGKLFAYRKTANVFTDARVNYVKEVLNNLKVIKFYSWEIPYSKIITENRNKEMNIVYIMQVARNIITSLGMSLTLFSSLVAFLVLYAIQGSTKDPASIFSSISLFSALASQVFMIPLALASGSDALIGVTRIGEFLAAEEVNPRSARITASEKTKADMEANKLALSIKNASFKWETFGEQGSHTNNTHTLSEKENFTASEKELYNKLEKHMTNKSISTISHESASSPDHGPFSDSSSLAEQNFPGLESIDLDVKKGEFVVITGLIGSGKTSLLNAMAGFMKRVSGSVDVNGSLLLCDQPWIQNATVRENILFGLPMDDAKYKNVVYACSLESDLEILPAGDLTEIGERGITLSGGQKARINLARAVYADMDIILLDDVLSAVDARVGKHIMAQCIMGILKDKTRILATHQLSLIGSADRIVFLNGNGSISVGTFEELKSKNEAFSHLMAFNADSHDSEDEKEEEVEDEEEREAVKELVERQVTRYKSRADEEEIRHDYEANADKDGRLIDDEEKAENGIKFEVYKNYLSIGSGIFKHYSSVPIVIVLIALSVFCQLFTNTWLSFWSEKKFAHKSNGFYIGFYVMFTFLAAIFLTLEFVLLAYLTNNASTKLNLMAVQKVLRAPMSYMDVTPMGRILNRFTKDTDTLDNEIGNQIRMLTYFFSNIVGVLVLCVIYLPWFAIAIPFLGFIFVAIGNFYQASAREIKRLEAVQRSFVYNNFNETLSGMKTIKAYQAEERFLEKNDTYVNNMNEAYYITIANQRWLSIHLDFVAAGFALIICFLCVFRVFKISAASVGLLLSYVLQIAGQLSMLVRTYTQVENEMNSVERICEYALYLPEEAPYNISETKPADSWPEHGAVRFENVSLAYRPGLPLVLKNLSADIKPKEKIGICGRTGAGKSSIMTALYRLSELNGGKIEIDGVDISKLGLNDLRSKLSIIPQDPVLFRGTIRKNLDPFNLSSEDVLWSALRRAGLIEESKLEFVKTQKPDAENLHKFHLDREVEDEGSNFSLGERQLISFARAMVRDSKILILDEATSSVDYETDSKIQSTIVREFGNCTILCIAHRLRTILNYDRILVLDRGEIKEFDTPWNLFQSEDGIFKQMCERSNITKDDFKH

SEQ ID NO: 1033 - DNA, 4266 bp, Pachysolen tannophilus
  source 1..4266: mol_type = other DNA
atggccgaagatgagtcctcctcaattcaagtttttgagaaagaaaagaacggcaagtcccatgccatgattgaagaagctcaaccagttgagtatatgaagcaaagaaggctgttctccttcctgttctctaaaaaggttccaccaattccaactccagacgaaagaaaaccatatccattcagaaaggccaacatcatctacaagattttcttttggtggctgatgccattgatgaacactggttacaaaagaaccttgcaacaagaggatttgtggtacttggatggtgatttgaagatcgaagaatattacgccatcttcgaaaagagattggctaagagaactcaaaaggctagagaagctcatttgaagttgctggaagagaagaagaaaaacggtactttcgatccaaacgaggacaatgaatttgaattcgaataccccagatactccttggtttgggctttgtttgatactttcaagtgggagtactctctgtccatagtttttgttgctttggctgatgttggtttcactttgaatcctttgttgtccaaggctttgatcgatttcgttgaagatagagtcttgggttacaagaccaacattggtcatggtgttggttatgctattggttgttctgctttggtttccgtttctggtattttgatcaaccacttcttcaacttgtctacccaagttggtgctaaatctaaagctactttgaccaaggctatgttggagaagtcttttaagttgaacgctaagggtagacataactacccagcttctaagattacttccatgttgggtactgatttgtccagagttgacttaggtattggtttccaacctattgctatcgtgtttccaattccagttgctatttccattgccttgttgatcgttaatatcggcgtttcttctttggccggtattggtattttcattatctccaccattattatcgctctggctaccaagaagttgttctcttacagaaagaagatcaccaagttcaccgactctagaatcaattacatgaaggaactgttgaacaacgtcaggatcatcaagtattattcttgggagccatcctacaaagaaaccattgctgatgttagaacctccgagatgtacaacattttcaagttgcagatcctgaggaacttcttgactgcttatgctgtttgtttgccacagatctcttctatggtttccttcttggttatgtacgccgttgataagaatagatccgctggtcaaattttcgcctctttgtctttgttcaacgtcttgtcccaacagattatgatgttgccattggctttggctactggttctgatgctttagttggtatcgatagagttagaggtttgttgcaatctggtgaagatgatccaaaggacagagaatcttcttacgttgatgttgacgaactgatcgaaaagaagttggccatctctgttagaaacgctactttccaatggaaaaccttcgaacaaatcgacgaatctgtctccccatctaaagaagaagaggaaaaagaaaagcagatcgagagagaggaagaacgtttgaacaacattaacaagcagttgtccggtaacttcgaccaatcttcttcattgtctgttaagcacactaagttcccaggtttgaagcacttggatttcgatattaagcagggtgagttcattatcatcaccggtattattggttccggcaagtcatctttgttgaatgctttggcaggtttcatggacaaagaagagggcgaattgaaaatcaacggttctttgttgttgtgtggttacccatggattcaaaatgctccagtcaaagagaacatcttgttcgattctgaatacgacgagaagaagtacaaggatacaatctacgcttgttccttggatgccgatttggatattttgccagctggtgatagaaccgaaattggtgaaagaggtattactttgtctggtggtcaaaaggcaagaatcaacttggctagagctgtttacgctgttaacgatatcatcttgttggacgatgttttgtctgctgttgatgctagagttggtaagcacattatggataactgtttcatgggtctgttgaaggataagaccagaattttggctacccaccaattgtctatgattaactctgctgatagggtcatcttcttgaatggtgatggtactgttgatatcggtactccagatgagttgttgaaatctaatgctgccttcctgaacctgatggaattttctaatgacgaaaagaacaccgaagaggaacaaaaagaaatgaacgatgaagaggacaaagaactgaagagacaaatgaccgaaaagtccttgttgaacgataacgacgaagatgacgaagaatccagaaaggatttcacttctaaaaccggtgaagcccaattgatccaaaaagaagagagagccattaacggcatctcattctctatctataagaactacgttatggctggttccggtgctttgaaagctggtatgactccagtattctttttcttcgttattctggccactttcttccagttgttcactaatacttggttgtctttctggaccgaagaaaagtttccaggtagatcttctggtttctacattggcttgtacgttgctttcacttgcttgaccattatcttcgtttctaccgagttttccctgatcgttttcattaccaacaaggcctctaagctgttgaatattgctgctgttaccaacttgttgcatgctccaatgtctttctttgataccactccaattggtaggatcttgaacagattcactaaggatacagatgccttggataacgaaatctctcaacaattgaggctgttcatctacccaactgctaatgtttgtggtgtcttgattctgtgcattatctacttgccatggttcgctattgctgttccattcttagttgctttgttcattggtttcgctaacttctatcaagcctcctctagagaaatcaagagattagaagctttggccaggtctttcgtttacaacaactttaacgaaaccctaggtggtatgaccaccattaagagttttaaggctgaatccaggttcctgatcaaaaacaacttgtacatcaacaggatgaacgaggcctactttatctccttgtctaatcaaagatggttgggtatccatttggatttggttgcttcagctttcgctttgattatagccttgttgtccgttaccagacaattccaaatttctgctgcttctgttggtttgttggtgtcatacgttatgcaaattgctggtcagttgtcgttgttgattagagctatgactcaagtcgaaaacgagatgaactctgttgaaagattggattactacgccttccatttgccatctgaagcaccatttgatattccagaaactgctccaccaccaacatggccacaacatggtgtagtagaattcaagaatgtctccttggcttatagaccaggtttgccattagtcctgaacaatatctcattttccgttaaggccggtgaaaagataggtatttgcggtagaactggtgctggtaaatcttctattatgactgccttgtacagattggctgaattggctaatggtgagattaacatcgacggtattaacattgccaagatcggtttgaactccttgagatccaagttgtccattattccacaagatccagttttgttcaggggtaacattagaaagaatctggaccctttcaacaagcacaacgatgatgaattgtggggtgctttaagaaggtctggtctaattgaagaatccgagttgtctaaggttaagtgtcaagctttgactgatccacaattgcacaagtttcacttggatcaggttgtagaagatgatggctctaatttctccttgggtgaaaaacaattgattgcattggcaagagccgttgtcagaaactccaagattttgattttggatgaagccacctcctccgttgattacgaaactgatgctaagattcaaaagaccatcgtgcaagaattctcttcctgtaccattttgtgcattgcccatagattgaaaaccatcgttgactacgatagaatcttggttttggataagggtcaagtccaacaattcaatactccatgggtcctgtttaacaaagaaggtatcttccaaaagatgtgcgagagatctaaaattaccgctttggacttcaaccgtaagagctaa

SEQ ID NO: 1034 - protein, 1421 aa, Pachysolen tannophilus
MAEDESSSIQVFEKEKNGKSHAMIEEAQPVEYMKQRRLFSFLFSKKVPPIPTPDERKPYPFRKANIIYKIFFWWLMPLMNTGYKRTLQQEDLWYLDGDLKIEEYYAIFEKRLAKRTQKAREAHLKLLEEKKKNGTFDPNEDNEFEFEYPRYSLVWALFDTFKWEYSLSIVFVALADVGFTLNPLLSKALIDFVEDRVLGYKTNIGHGVGYAIGCSALVSVSGILINHFFNLSTQVGAKSKATLTKAMLEKSFKLNAKGRHNYPASKITSMLGTDLSRVDLGIGFQPIAIVFPIPVAISIALLIVNIGVSSLAGIGIFIISTIIIALATKKLFSYRKKITKFTDSRINYMKELLNNVRIIKYYSWEPSYKETIADVRTSEMYNIFKLQILRNFLTAYAVCLPQISSMVSFLVMYAVDKNRSAGQIFASLSLFNVLSQQIMMLPLALATGSDALVGIDRVRGLLQSGEDDPKDRESSYVDVDELIEKKLAISVRNATFQWKTFEQIDESVSPSKEEEEKEKQIEREEERLNNINKQLSGNFDQSSSLSVKHTKFPGLKHLDFDIKQGEFIIITGIIGSGKSSLLNALAGFMDKEEGELKINGSLLLCGYPWIQNAPVKENILFDSEYDEKKYKDTIYACSLDADLDILPAGDRTEIGERGITLSGGQKARINLARAVYAVNDIILLDDVLSAVDARVGKHIMDNCFMGLLKDKTRILATHQLSMINSADRVIFLNGDGTVDIGTPDELLKSNAAFLNLMEFSNDEKNTEEEQKEMNDEEDKELKRQMTEKSLLNDNDEDDEESRKDFTSKTGEAQLIQKEERAINGISFSIYKNYVMAGSGALKAGMTPVFFFFVILATFFQLFTNTWLSFWTEEKFPGRSSGFYIGLYVAFTCLTIIFVSTEFSLIVFITNKASKLLNIAAVTNLLHAPMSFFDTTPIGRILNRFTKDTDALDNEISQQLRLFIYPTANVCGVLILCIIYLPWFAIAVPFLVALFIGFANFYQASSREIKRLEALARSFVYNNFNETLGGMTTIKSFKAESRFLIKNNLYINRMNEAYFISLSNQRWLGIHLDLVASAFALIIALLSVTRQFQISAASVGLLVSYVMQIAGQLSLLIRAMTQVENEMNSVERLDYYAFHLPSEAPFDIPETAPPPTWPQHGVVEFKNVSLAYRPGLPLVLNNISFSVKAGEKIGICGRTGAGKSSIMTALYRLAELANGEINIDGINIAKIGLNSLRSKLSIIPQDPVLFRGNIRKNLDPFNKHNDDELWGALRRSGLIEESELSKVKCQALTDPQLHKFHLDQVVEDDGSNFSLGEKQLIALARAVVRNSKILILDEATSSVDYETDAKIQKTIVQEFSSCTILCIAHRLKTIVDYDRILVLDKGQVQQFNTPWVLFNKEGIFQKMCERSKITALDFNRKS

SEQ ID NO: 1035 - DNA, 4647 bp, Cyberlindnera fabianii; identical to SEQ ID NO: 975
  source 1..4647: mol_type = other DNA

SEQ ID NO: 1036 - protein, 1548 aa, Cyberlindnera fabianii; identical to SEQ ID NO: 976

SEQ ID NO: 1037 - DNA, 4470 bp, Hanseniaspora uvarum; identical to SEQ ID NO: 991
  source 1..4470: mol_type = other DNA

SEQ ID NO: 1038 - protein, 1489 aa, Hanseniaspora uvarum; identical to SEQ ID NO: 992

SEQ ID NO: 1039 - DNA, 4374 bp, Candida theae
  source 1..4374: mol_type = other DNA
atgacctctccatctgccttggaatccaatcaattgtctactgaaagacagaagaggctgttgtctttcttgatgtctaaaaaggttccaccagtgccaactcaagaagaaagaaaaccatatccaggttacagagccaacattatcaagcagttgtttttctggtggttgtccccagttatgaaggttggttatcaaagaacattgcaaccagacgacatgttctacttgaccgatgatattaaggttcagaaaatggccgaagatttctacaggtacatgtcccatgatattgatagagctagacaaaagcacattgctgaaaagtgtgctaaaagaggtgaagctccagaaactacttctgtttctcctgaagaagatatgaaggacttcgagatgtctaagttcttgactgtttgggctttagctaagacttttaagtggcagtatacttgggcttgtgtttgtttggctttgtctaatgctggtcaaactactatgcctctgctgtccaaaaagttgatccaatacgttgaattgaaggcctatggtagagaaccaggtgttggtaaaggtttgggttattcttttggtactactgccatggttttcatcgttggtgttttgatcaaccacttcttctacagatctatgattactggtgctcaagctaaagctgttttgactaaggctttgttggacaagtctttcaagttgtctgctgaagctaaacacaagtactccgttggtaagattacttccatgttgggtactgacttgtctagaattgatttcgctttgggtttccagccattcttgatcgtttttccaattccaattgctatcgccatcgttatcttggtcatcaatattggtgttgcctctttggttggtgtcggtattttgttggtttttatgattggtatcgccttctctaccggtaagttgtttgcttatagaaagaaggctaacaagtacaccgattccagagttaactacatgaaggaagctctgaacaacctgaagatcatcaagttttattcttgggaaccaccataccacaagaacatttccgatatcagaaagaaagagatgaggatcatctacagaatgcaggtcttgagaaatatcgttacctctttcgctatgtccttgactttgttcgcttctatgactgcatttttggtcttgtacgctatctctaacggtagaagagatccagcttctatcttctcttccttgtccttgtataacgtcttgacccaacaagttttcttgttgccaatggctttggctacaggtgctgatgcttttatgggtatttctagagttggtgatttcatggcccaatctgaaatcaatccagaagaaaacgctattgaagctcctccagatgtacaagagtggatggacaaagaatctttggctattgatatcgagaaggcctcttttgaatgggaagtttttgaagatgaggacgagaaagaagagaagtcctctaaaaagtctaagaagggaaacaagaggaactccgaagaatctgctattttggatgttcaagactccgatgtctctagctcaaaaggtttagatagatcctctattaccgacggttcttccgaagaagatgcacattttgaaggtttgaagaacatcgacttcaagatcaagaagggtgaattcgttgttatcactggtatgatcggttccggtaaatcttctttgttatctgctatgtccggtttcatgaagagaaactctggttctgtttacgtcaacggttctttgttgttgtgtggttatccatgggttcaaaactccactgttaaggacaacatcatcttcggttctgaatacgacgaagaaaagtacaagagagttatctacgcttgctctttggaagccgatttggaattattgccagctggtgatagaaccgaaattggtgaaagaggaattactttgtctggtggtcaaaaggctagaatcaatttggctagagctgtttacgctaacaaggacattatcttgttggatgatgttttgtccgctgttgatgcaagagttggtaaacatattatgaacaactgcctgctggacctgttgaaagaaaagactagagttttggctacccaccagttgtctttgattggttctgctgatagagtcatcttcttgaatggtgatggttccattgatgtcggtaagttcgaagaattgaaagagagaaatccaggtttcggtaaattgatggctttcaactccgaatccaaagaagaaaaagaaggcaacgaagaagaattggaacaatccgctgaacaagaattgatcgaagaggataagagaaacatcgaaagacagttgactagaagatccactagaactgttactactgttggtgcttttccagaagatgtcgacgaagaggaagaagaggacgaagaaggtagacatagggagtataatttggatgaagaagctgacggcaagttgattactgatgaagaaagagcagttaacgccatctctaagaaaatctacgctagatacttccagctaggttctggtaaattcactccatgggctatgttgcctttgttattgacttttattgtcctggctaccttctctcaaattttcactaatacctggttgtccttctggactgagtacaaatttgataagcctaacaagttctacatcggcatctacatcatgttcacgttcttgtccttcattttgttgacctgcgaattcatcatcttggtctatattaccaataccgcctccgttcaaatgaacgttttagcagttcaaaaggtcttgcatgctccaatgtcttttatggatacaactccaatgggcagaatcttgaacagattcactaaggataccgatgtcttggataacgaaatcggtgatcaattgaggttcttcttgtttgttttcgccaacatcattggtgttatcgtcttgtgcattatctacttgccttggtttgctattgctgttccatttttgggtatgctgttcgtttcaattgccgattattaccaagcttctgccagagaagttaagagattggaagctgttcaaaggtccttggtttacaacaacttcaacgaaacattgtctggtatggctaccattaaggcttacaaagctaccgaaagattcatcgacaagaacaactacctgatcaacagaatgaacgaagcctactacattaccattgctaatcaaagatggttggccatccacatggattttgttgctactttattcgccttgctgattgctttgttgtgcgtttttagagtgttcaacgtttccgcttctactgtcggtttgattttgtcttacgtcttgcaaatagccggtcagttgtctatgttgattagaactttcacccaggtcgaaaacgaaatgaattctgctgaaaggttgaactcttacgctacttctttgccaacagaagccccttacattattactgaaaatgctccaccaccaaactggccatctcaaggtactatagtttttgattacgcttccttggcttacagaccaggtttgccattggttttgaagaatttgaacttctccgttaagcccatcgaaaagattggtatttgtggtagaactggtgctggtaagtcatctattatgactgccttgtacaggttgtccgaattggattcaggtaagattgaaatcgatggcatcgacatctctaaattgggcttgaaggatttgaggtccaagttgtcaattatcccacaagatccagtcttgtttagaggcactatcagatctaacttggatccattcaatgaacacgacgacgaaagattgtgggatgctttgagaagaactggtttgattgaaggttccagattagaagccgttaagagacaagctaagtccaagtcatcaagcaacaacatgtctgaaaaatccgccgaaaagtctactactactccagattctttagccttgcataagttccatttggatcaaactgttgaggatgacggttctaatttcagcttaggtgaaaggcaattgatcgcttttgctagagctttggttagagactccaagattttgatcttagatgaagccacctcctccgttgattacgaaactgattctaagatccaagaaaccatcatcagggaattcaaggattgcaccattttgtgcattgcccataggttgaaaactatcatcaactacgataggatcctggttttggataagggtgaagttagagaatttgataccccatggaacttgttcaactctaagggttctattttcaagcagatgtgcgaaagatctaacgttaccgaacaagatttcggtcagtga

SEQ ID NO: 1040 - protein, 1457 aa, Candida theae
MTSPSALESNQLSTERQKRLLSFLMSKKVPPVPTQEERKPYPGYRANIIKQLFFWWLSPVMKVGYQRTLQPDDMFYLTDDIKVQKMAEDFYRYMSHDIDRARQKHIAEKCAKRGEAPETTSVSPEEDMKDFEMSKFLTVWALAKTFKWQYTWACVCLALSNAGQTTMPLLSKKLIQYVELKAYGREPGVGKGLGYSFGTTAMVFIVGVLINHFFYRSMITGAQAKAVLTKALLDKSFKLSAEAKHKYSVGKITSMLGTDLSRIDFALGFQPFLIVFPIPIAIAIVILVINIGVASLVGVGILLVFMIGIAFSTGKLFAYRKKANKYTDSRVNYMKEALNNLKIIKFYSWEPPYHKNISDIRKKEMRIIYRMQVLRNIVTSFAMSLTLFASMTAFLVLYAISNGRRDPASIFSSLSLYNVLTQQVFLLPMALATGADAFMGISRVGDFMAQSEINPEENAIEAPPDVQEWMDKESLAIDIEKASFEWEVFEDEDEKEEKSSKKSKKGNKRNSEESAILDVQDSDVSSSKGLDRSSITDGSSEEDAHFEGLKNIDFKIKKGEFVVITGMIGSGKSSLLSAMSGFMKRNSGSVYVNGSLLLCGYPWVQNSTVKDNIIFGSEYDEEKYKRVIYACSLEADLELLPAGDRTEIGERGITLSGGQKARINLARAVYANKDIILLDDVLSAVDARVGKHIMNNCLLDLLKEKTRVLATHQLSLIGSADRVIFLNGDGSIDVGKFEELKERNPGFGKLMAFNSESKEEKEGNEEELEQSAEQELIEEDKRNIERQLTRRSTRTVTTVGAFPEDVDEEEEEDEEGRHREYNLDEEADGKLITDEERAVNAISKKIYARYFQLGSGKFTPWAMLPLLLTFIVLATFSQIFTNTWLSFWTEYKFDKPNKFYIGIYIMFTFLSFILLTCEFIILVYITNTASVQMNVLAVQKVLHAPMSFMDTTPMGRILNRFTKDTDVLDNEIGDQLRFFLFVFANIIGVIVLCIIYLPWFAIAVPFLGMLFVSIADYYQASAREVKRLEAVQRSLVYNNFNETLSGMATIKAYKATERFIDKNNYLINRMNEAYYITIANQRWLAIHMDFVATLFALLIALLCVFRVFNVSASTVGLILSYVLQIAGQLSMLIRTFTQVENEMNSAERLNSYATSLPTEAPYIITENAPPPNWPSQGTIVFDYASLAYRPGLPLVLKNLNFSVKPIEKIGICGRTGAGKSSIMTALYRLSELDSGKIEIDGIDISKLGLKDLRSKLSIIPQDPVLFRGTIRSNLDPFNEHDDERLWDALRRTGLIEGSRLEAVKRQAKSKSSSNNMSEKSAEKSTTTPDSLALHKFHLDQTVEDDGSNFSLGERQLIAFARALVRDSKILILDEATSSVDYETDSKIQETIIREFKDCTILCIAHRLKTIINYDRILVLDKGEVREFDTPWNLFNSKGSIFKQMCERSNVTEQDFGQ

SEQ ID NO: 1041 - protein, 7 aa, unidentified
  MOTIF 1..7
GSIGTGK

SEQ ID NO: 1042 - protein, 7 aa, unidentified
  MOTIF 1..7
GAIGTGK

SEQ ID NO: 1043 - protein, 7 aa, unidentified
  MOTIF 1..7
GLIGTGK

SEQ ID NO: 1044 - protein, 7 aa, unidentified
  MOTIF 1..7
GVIGTGK

SEQ ID NO: 1045 - protein, 7 aa, unidentified
  MOTIF 1..7
GMIGTGK

SEQ ID NO: 1046 - protein, 7 aa, unidentified
  MOTIF 1..7
GPIGTGK

SEQ ID NO: 1047 - protein, 7 aa, unidentified
  MOTIF 1..7
GSIGSGK

SEQ ID NO: 1048 - protein, 7 aa, unidentified
  MOTIF 1..7
GAIGSGK

SEQ ID NO: 1049 - protein, 7 aa, unidentified
  MOTIF 1..7
GLIGSGK

SEQ ID NO: 1050 - protein, 7 aa, unidentified
  MOTIF 1..7
GVIGSGK

SEQ ID NO: 1051 - protein, 7 aa, unidentified
  MOTIF 1..7
GMIGSGK

SEQ ID NO: 1052 - protein, 7 aa, unidentified
  MOTIF 1..7
GPIGSGK

SEQ ID NO: 1053 - protein, 7 aa, unidentified
  MOTIF 1..7
GRTGAGK

SEQ ID NO: 1054 - protein, 5 aa, unidentified
  MOTIF 1..5
LSGGQ

SEQ ID NO: 1055 - protein, 6 aa, unidentified
  MOTIF 1..6
NFSLGE

SEQ ID NO: 1056 - protein, 7 aa, unidentified
  MOTIF 1..7
GXIGXGK

SEQ ID NO: 1057 - protein, 7 aa, unidentified
  MOTIF 1..7
GXIGXGK

SEQ ID NO: 1058 - protein, 8 aa, unidentified
  MOTIF 1..8
GXXGAGKX

SEQ ID NO: 1059 - protein, 8 aa, unidentified
  MOTIF 1..8
GXXGAGKX

SEQ ID NO: 1060 - protein, 7 aa, unidentified
  MOTIF 1..7
GXXGXGK

SEQ ID NO: 1061 - protein, 8 aa, unidentified
  MOTIF 1..8
GRPGSGCX

SEQ ID NO: 1062 - protein, 8 aa, unidentified
  MOTIF 1..8
GXSGAGKT

SEQ ID NO: 1063 - protein, 12 aa, unidentified
  MOTIF 1..12
VSGGERKRVSIA

SEQ ID NO: 1064 - protein, 12 aa, unidentified
  MOTIF 1..12
LNVEQRKRLTIG

SEQ ID NO: 1065 - protein, 5 aa, unidentified
  MOTIF 1..5
XQCWD

SEQ ID NO: 1066 - protein, 6 aa, unidentified
  MOTIF 1..6
LLXFXD

SEQ ID NO: 1067 - protein, 8 aa, unidentified
  MOTIF 1..8
GRPGSGCX
